(19) United States
(12) Patent Application Publication
(10) Pub. No.: US 2018/0243225 A1
(43) Pub. Date: Aug. 30, 2018

(54) EBOLA/MARBURG VACCINES

(71) Applicant: ModernaTX, Inc., Cambridge, MA (US)

(72) Inventor: Giuseppe Ciaramella, Sudbury, MA (US)

(73) Assignee: ModernaTX, Inc., Cambridge, MA (US)

(21) Appl. No.: 15/880,436

(22) Filed: Jan. 25, 2018

Related U.S. Application Data
(60) Provisional application No. 62/450,537, filed on Jan. 25, 2017.

(51) Int. Cl. A61K 9/51; A61K 39/12; C12N 7/00; C07K 14/005; A61K 39/39; A61P 31/14

(52) U.S. Cl. CPC A61K 9/5123; A61K 39/12; C12N 7/00; A61K 2039/53; A61K 39/39; A61P 31/14; C07K 14/005

(57) ABSTRACT

The disclosure relates to Ebola virus and/or Marburg virus ribonucleic acid (RNA) vaccines, as well as methods of using the vaccines and compositions comprising the vaccines. The vaccines include one or more RNA polynucleotides having an open reading frame encoding Ebola virus and/or Marburg virus. Methods for preparing and using such vaccines are also described.

### RELATED APPLICATION

[0001] This application claims the benefit under 35 U.S.C. § 119(e) of U.S. provisional application No. 62/450,537, filed Jan. 25, 2017, which is incorporated by reference herein in its entirety.

### BACKGROUND

[0002] Ebola virus belongs to the Filoviridae family, similar to the Marburg virus. Filoviruses are relatively simple viruses of 19 Kb genomes and consist of seven genes which encode nucleoprotein (NP), glycoprotein (GP), four smaller viral proteins (VP24, VP30, VP35 and VP40), and the RNA-dependent RNA polymerase (L protein) all in a single strand of negative-sensed RNA. In general, minus-strand (−) RNA viruses, such as Ebola virus and Marburg virus, are major causes of human suffering that cause epidemics of serious human illness. In humans the diseases caused by these viruses include Ebola (Orthomyxoviridae), Marburg virus disease (Marburgvirus), mumps, measles, upper and lower respiratory tract disease (Paramyxoviridae), rabies (Rhabdoviridae), hemorrhagic fever (Filoviridae, Bunyaviridae and Arenaviridae), encephalitis (Bunyaviridae) and neurological illness (Bomaviridae). Due to the severity of disease caused by filoviruses, these viruses are considered a significant world health threat. For instance they have many of the characteristics commonly associated with biological weapons since they can be grown in large quantities, can be fairly stable, are highly infectious as an aerosol, and are exceptionally deadly.

[0003] Deoxyribonucleic acid (DNA) vaccination is one technique used to stimulate humoral and cellular immune responses to foreign antigens. The direct injection of genetically engineered DNA (e.g., naked plasmid DNA) into a living host results in a small number of its cells directly producing an antigen, resulting in a protective immunological response. With this technique, however, comes potential problems, including the possibility of insertional mutagenesis, which could lead to the activation of oncogenes or the inhibition of tumor suppressor genes.

### SUMMARY

[0004] Provided herein is a ribonucleic acid (RNA) vaccine that builds on the knowledge that RNA (e.g., messenger RNA (mRNA)) can safely direct the body's cellular machinery to produce nearly any protein of interest, from native proteins to antibodies and other entirely novel protein constructs that can have therapeutic activity inside and outside of cells. The RNA vaccines of the present disclosure may be used to induce a balanced immune response against Ebola virus and/or Marburg virus, comprising both cellular and humoral immunity, without risking the possibility of insertional mutagenesis, for example.

[0005] The RNA (e.g., mRNA) vaccines may be utilized in various settings depending on the prevalence of the infection or the degree or level of unmet medical need. The RNA (e.g., mRNA) vaccines may be utilized to treat and/or prevent an Ebola virus, a Marburg virus, or a combination of both viruses, of various genotypes, strains, and isolates. The RNA (e.g., mRNA) vaccines have superior properties in that they produce much larger antibody titers and produce responses earlier than commercially available anti-viral therapeutic treatments. As demonstrated in the examples, the mRNA vaccines described herein were capable of providing 100% protection against the Ebola viral infection in an animal model. While not wishing to be bound by theory, it is believed that the RNA vaccines, as mRNA polynucleotides, are better designed to produce the appropriate protein conformation upon translation as the RNA vaccines co-opt natural cellular machinery. Unlike traditional vaccines which are manufactured ex vivo and may trigger unwanted cellular responses, the RNA vaccines are presented to the cellular system in a more native fashion.

[0006] Some embodiments of the present disclosure provide Ebola virus (Ebola, EBOV) vaccines that include at least one RNA (e.g., mRNA) polynucleotide having an open reading frame encoding at least one Ebola antigenic polypeptide or an immunogenic fragment thereof (e.g., an immunogenic fragment capable of inducing an immune response to Ebola).

[0007] In some embodiments, the antigenic polypeptide is selected from EBOV glycoprotein (GP), surface EBOV GP, wild type EBOV GP, mature EBOV GP, secreted wild type EBOV GP, secreted mature EBOV GP, sGP, delta peptide (Δ-peptide), GP1, GP1,2Δ, or immunogenic fragments thereof or combinations thereof. In other embodiments the antigenic polypeptide is EBOV nucleoprotein NP, viral polymerase L, the polymerase cofactor VP35, the transcriptional activator VP30, VP24, or the matrix protein VP40

[0008] In some embodiments, the at least one antigenic polypeptide is from Ebola virus strain subtype Zaire, strain H. sapiens-wt/GIN/2014/Kissidougou-C15; subtype Bundibugyo, strain Uganda 2007; subtype Zaire, strain Mayinga 1976; subtype Sudan, strain Gulu, or a combination thereof.

[0009] Some embodiments of the present disclosure provide Marburg virus (Marburg, MARV) vaccines that include at least one RNA (e.g., mRNA) polynucleotide having an open reading frame encoding at least one Marburg antigenic polypeptide or an immunogenic fragment thereof (e.g., an immunogenic fragment capable of inducing an immune response to Marburg).

[0010] In some embodiments, the antigenic polypeptide is selected from MARV glycoprotein (GP), surface MARV GP, wild type MARV GP, mature MARV GP, secreted wild type MARV GP, secreted mature MARV GP, or combinations thereof.

[0011] In some aspects the invention is an Ebola/Marburg virus vaccine, comprising at least one RNA polynucleotide having an open reading frame encoding at least one Ebola virus or Marburg virus antigenic polypeptide, formulated in a cationic lipid nanoparticle.

[0012] In some embodiments, a RNA (e.g., mRNA) vaccine comprises at least one RNA (e.g., mRNA) polynucleotide having an open reading frame encoding at least one EBOV or MARV antigenic polypeptide. In some embodiments, at least one antigenic polypeptide is an EBOV or MARV polyprotein. In some embodiments, at least one antigenic polypeptide is major surface glycoprotein G or an immunogenic fragment thereof. In some embodiments, at least one antigenic polypeptide is sGP, delta peptide (Δ-peptide), GP1, GP1,2Δ, or immunogenic fragments thereof. The predominant products of the GP gene, sGP and delta peptide (Δ-peptide), are generated through furin cleavage from a precursor (pre-sGP) that is produced from nonedited mRNA species and are efficiently released from infected cells. In other embodiments the antigenic polypeptide is EBOV nucleoprotein NP, viral polymerase L, the polymerase cofactor VP35, the transcriptional activator VP30, VP24, or the matrix protein VP40.

[0013] In some embodiments, at least one EBOV antigenic polypeptide comprises an amino acid sequence of Tables 3, 5, or 9. In some embodiments, the amino acid sequence of the EBOV antigenic polypeptide is, or is a fragment of, or is a homolog or variant having at least 80% (e.g., 85%, 90%, 95%, 98%, 99%) identity to, the amino acid sequence of Tables 3, 5, or 9.

[0014] In some embodiments, at least one EBOV antigenic polypeptide is encoded by a nucleic acid sequence of Tables 3 or 4.

[0015] In some embodiments, at least one EBOV RNA (e.g., mRNA) polynucleotide is encoded by a nucleic acid sequence, or a fragment of or is a nucleotide sequence of Tables 6 or 8.

[0016] In some embodiments, at least one MARV antigenic polypeptide comprises an amino acid sequence of Table 10. In some embodiments, the amino acid sequence of the MARV antigenic polypeptide is, or is a fragment of, or is a homolog or variant having at least 80% (e.g., 85%, 90%, 95%, 98%, 99%) identity to, the amino acid sequence of Table 10.

[0017] In some embodiments, at least one MARV antigenic polypeptide is encoded by a nucleic acid sequence of Table 11.

[0018] In some embodiments, at least one MARV RNA (e.g., mRNA) polynucleotide is encoded by a nucleic acid sequence, or a fragment of or is a nucleotide sequence of Table 12.

[0019] In some embodiments, an open reading frame of a RNA (e.g., mRNA) vaccine is codon-optimized. In some embodiments, at least one RNA polynucleotide encodes at least one antigenic polypeptide having an amino acid sequence of Tables 6, 8, or 12 (see also amino acid sequences of Table 9) and is codon optimized mRNA.

[0020] In some embodiments, a RNA (e.g., mRNA) vaccine further comprises an adjuvant.

[0021] Table 9 provides National Center for Biotechnology Information (NCBI) accession numbers of interest. It should be understood that the phrase “an amino acid sequence of Table 9” refers to an amino acid sequence identified by one or more NCBI accession numbers listed in Table 9. Each of the amino acid sequences, and variants having greater than 95% identity or greater than 98% identity to each of the amino acid sequences encompassed by the accession numbers of Table 9 are included within the constructs (polynucleotides/polypeptides) of the present disclosure.

[0022] In some embodiments, at least one mRNA polynucleotide is encoded by a nucleic acid of Tables 6, 8, and 12 (see also Table 9) and having less than 80% identity to wild-type mRNA sequence. In some embodiments, at least one mRNA polynucleotide is encoded by a nucleic acid having a sequence of Tables 6, 8, and 12 (see also nucleic acid sequences of Table 9) and having less than 75%, 85% or 95% identity to a wild-type mRNA sequence. In some embodiments, at least one mRNA polynucleotide is encoded by a nucleic acid having a sequence of Tables 6, 8, and 12 (see also nucleic acid sequences of Table 9) and having less than 50-80%, 60-80%, 40-80%, 30-80%, 70-80%, 75-80% or 78-80% identity to wild-type mRNA sequence. In some embodiments, at least one mRNA polynucleotide is encoded by a nucleic acid of Tables 6, 8, and 12 (see also nucleic acid sequences of Table 9) and having less than 40-85%, 50-85%, 60-85%, 30-85%, 70-85%, 75-85% or 80-85% identity to wild-type mRNA sequence. In some embodiments, at least one mRNA polynucleotide is encoded by a nucleic acid having a sequence of Tables 6, 8, and 12 (see also nucleic acid sequences of Table 9) and having less than 40-90%, 50-90%, 60-90%, 30-90%, 70-90%, 75-90%, 80-90%, or 85-90% identity to wild-type mRNA sequence.

[0023] In some embodiments, at least one RNA polynucleotide encodes at least one antigenic polypeptide having an amino acid sequence of Tables 5 and 10 (see also amino acid sequences of Table 9) and having at least 80% (e.g., 85%, 90%, 95%, 98%, 99%) identity to wild-type mRNA sequence, but does not include wild-type mRNA sequence.

[0024] In some embodiments, at least one RNA polynucleotide encodes at least one antigenic polypeptide having an amino acid sequence of Tables 5 and 10; see also amino acid sequences of Table 9) and has less than 95%, 90%, 85%, 80% or 75% identity to wild-type mRNA sequence. In some embodiments, at least one RNA polynucleotide encodes at least one antigenic polypeptide having an amino acid sequence of Tables 5 and 10 (; see also amino acid sequences of Table 9) and has 30-80%, 40-80%, 50-80%, 60-80%, 70-80%, 75-80% or 78-80%, 30-85%, 40-85%, 50-805%, 60-85%, 70-85%, 75-85% or 78-85%, 30-90%, 40-90%, 50-90%, 60-90%, 70-90%, 75-90%, 80-90% or 85-90% identity to wild-type mRNA sequence.

[0025] In some embodiments, at least one RNA polynucleotide encodes at least one antigenic polypeptide having at least 90%, at least 95%, at least 96%, at least 97%, at least 98%, or at least 99% identity to an amino acid sequence of Tables 5 and 10 (see also amino acid sequences of Table 9). In some embodiments, at least one RNA polynucleotide encodes at least one antigenic polypeptide having 95%-99% identity to an amino acid sequence of Tables 5 and 10 (see also amino acid sequences of Table 9).

[0026] In some embodiments, at least one RNA polynucleotide encodes at least one antigenic polypeptide having at least 90%, at least 95%, at least 96%, at least 97%, at least 98%, or at least 99% identity to an amino acid sequence of Tables 5 and 10 (see also amino acid sequences of Table 9) and having membrane fusion activity. In some embodiments, at least one RNA polynucleotide encodes at least one antigenic polypeptide having 95%-99% identity to an amino acid sequence of Tables 5 and 10 (see also amino acid sequences of Table 9) and having membrane fusion activity.

[0027] In some embodiments, at least one RNA polynucleotide encodes at least one antigenic polypeptide (e.g., at least one EBOV antigenic polypeptide, at least one MARV antigenic polypeptide, or a combination of the foregoing antigenic polypeptides) that attaches to cell receptors.

[0028] In some embodiments, at least one RNA polynucleotide encodes at least one antigenic polypeptide (e.g., at least one EBOV antigenic polypeptide, at least one MARV antigenic polypeptide or a combination of the foregoing antigenic polypeptides) that causes fusion of viral and cellular membranes.

[0029] In some embodiments, at least one RNA polynucleotide encodes at least one antigenic polypeptide (e.g., at least one EBOV antigenic polypeptide, at least one MARV antigenic polypeptide, or a combination of the foregoing antigenic polypeptides) that is responsible for binding of the virus to a cell being infected.

[0030] Some embodiments of the present disclosure provide a vaccine that includes at least one ribonucleic acid (RNA) (e.g., mRNA) polynucleotide having an open reading frame encoding at least one antigenic polypeptide (e.g., at least one EBOV antigenic polypeptide, at least one MARV antigenic polypeptide, or a combination of the foregoing antigenic polypeptides), at least one 5′ terminal cap and at least one chemical modification, formulated within a lipid nanoparticle.

[0031] In some embodiments, a 5′ terminal cap is 7mG(5′)ppp(5′)NlmpNp.

[0032] In some embodiments, at least one chemical modification is selected from pseudouridine, N1-methylpseudouridine, N1-ethylpseudouridine, 2-thiouridine, 4′-thiouridine, 5-methylcytosine, 5-methyluridine, 2-thio-1-methyl-1-deaza-pseudouridine, 2-thio-1-methyl-pseudouridine, 2-thio-5-aza-uridine, 2-thio-dihydropseudouridine, 2-thio-dihydrouridine, 2-thio-pseudouridine, 4-methoxy-2-thio-pseudouridine, 4-methoxy-pseudouridine, 4-thio-1-methyl-pseudouridine, 4-thio-pseudouridine, 5-aza-uridine, dihydropseudouridine, 5-methoxyuridine and 2′-O-methyl uridine. In some embodiments, the chemical modification is in the 5-position of the uracil. In some embodiments, the chemical modification is a N1-methylpseudouridine. In some embodiments, the chemical modification is a N1-ethylpseudouridine.

[0033] In some embodiments, a lipid nanoparticle comprises a cationic lipid, a PEG-modified lipid, a sterol and a non-cationic lipid. In some embodiments, a cationic lipid is an ionizable cationic lipid and the non-cationic lipid is a neutral lipid, and the sterol is a cholesterol.

[0034] In some embodiments, a lipid nanoparticle comprises compounds of Formula (I) and/or Formula (II), discussed below.

[0035] In some embodiments, an Ebola/Marburg virus RNA (e.g., mRNA) vaccine is formulated in a lipid nanoparticle that comprises a compound selected from Compounds 3, 18, 20, 25, 26, 29, 30, 60, 108-112 and 122, described below.

[0036] Some embodiments of the present disclosure provide a vaccine that includes at least one RNA (e.g., mRNA) polynucleotide having an open reading frame encoding at least one antigenic polypeptide (e.g., at least one EBOV antigenic polypeptide, at least one MARV antigenic polypeptide, or a combination of the foregoing antigenic polypeptides), wherein at least 80% (e.g., 85%, 90%, 95%, 98%, 99%) of the uracil in the open reading frame have a chemical modification, optionally wherein the vaccine is formulated in a lipid nanoparticle (e.g., a lipid nanoparticle comprises a cationic lipid, a PEG-modified lipid, a sterol and a non-cationic lipid).

[0037] In some embodiments, 100% of the uracil in the open reading frame have a chemical modification. In some embodiments, a chemical modification is in the 5-position of the uracil. In some embodiments, a chemical modification is a N1-methyl pseudouridine. In some embodiments, 100% of the uracil in the open reading frame have a N1-methyl pseudouridine in the 5-position of the uracil.

[0038] In some embodiments, an open reading frame of a RNA (e.g., mRNA) polynucleotide encodes at least two antigenic polypeptides (e.g., at least two EBOV antigenic polypeptides, at least two MARV antigenic polypeptides, or a combination of the foregoing antigenic polypeptides). In some embodiments, the open reading frame encodes at least five or at least ten antigenic polypeptides. In some embodiments, the open reading frame encodes at least 100 antigenic polypeptides. In some embodiments, the open reading frame encodes 2-100 antigenic polypeptides.

[0039] In some embodiments, a vaccine comprises at least two RNA (e.g., mRNA) polynucleotides, each having an open reading frame encoding at least one antigenic polypeptide (e.g., at least one EBOV antigenic polypeptide, at least one MARV antigenic polypeptide, or a combination of the foregoing antigenic polypeptides). In some embodiments, the vaccine comprises at least five or at least ten RNA (e.g., mRNA) polynucleotides, each having an open reading frame encoding at least one antigenic polypeptide or an immunogenic fragment thereof. In some embodiments, the vaccine comprises at least 100 RNA (e.g., mRNA) polynucleotides, each having an open reading frame encoding at least one antigenic polypeptide. In some embodiments, the vaccine comprises 2-100 RNA (e.g., mRNA) polynucleotides, each having an open reading frame encoding at least one antigenic polypeptide.

[0040] In some embodiments, at least one antigenic polypeptide (e.g., at least one EBOV antigenic polypeptide, at least one MARV antigenic polypeptide, or a combination of the foregoing antigenic polypeptides) is fused to a signal peptide. In some embodiments, the signal peptide is selected from: a HuIgGk signal peptide (METPAQLLFLLLLWLPDTTG; SEQ ID NO: 178); IgE heavy chain epsilon-1 signal peptide (MDWTWILFLVAAATRVHS; SEQ ID NO: 179); Japanese encephalitis PRM signal sequence (MLGSNSGQRVVFTILLLLVAPAYS; SEQ ID NO: 180), VSVg protein signal sequence (MKCLLYLAFLFIGVNCA; SEQ ID NO: 181) and Japanese encephalitis JEV signal sequence (MWLVSLAIVTACAGA; SEQ ID NO: 182).

[0041] In some embodiments, the signal peptide is fused to the N-terminus of at least one antigenic polypeptide. In some embodiments, a signal peptide is fused to the C-terminus of at least one antigenic polypeptide.

[0042] In some embodiments, at least one antigenic polypeptide (e.g., at least one EBOV antigenic polypeptide, at least one MARV antigenic polypeptide, or a combination of the foregoing antigenic polypeptides) comprises a mutated N-linked glycosylation site.

[0043] Also provided herein is a RNA (e.g., mRNA) vaccine of any one of the foregoing paragraphs (e.g., an EBOV vaccine, a MARV vaccine, or a combination of the foregoing vaccines), formulated in a nanoparticle (e.g., a lipid nanoparticle).

[0044] In some embodiments, the nanoparticle has a mean diameter of 50-200 nm. In some embodiments, the nanoparticle is a lipid nanoparticle. In some embodiments, the lipid nanoparticle comprises a cationic lipid, a PEG-modified lipid, a sterol and a non-cationic lipid. In some embodiments, the lipid nanoparticle comprises a molar ratio of about 20-60% cationic lipid, 0.5-15% PEG-modified lipid, 25-55% sterol, and 25% non-cationic lipid. In some embodiments, the cationic lipid is an ionizable cationic lipid and the non-cationic lipid is a neutral lipid, and the sterol is a cholesterol. In some embodiments, the cationic lipid is selected from 2,2-dilinoleyl-4-dimethylaminoethyl-[1,3]-dioxolane (DLin-KC2-DMA), dilinoleyl-methyl-4-dimethylaminobutyrate (DLin-MC3-DMA), and di((Z)-non-2-en-1-yl) 9-((4-(dimethylamino)butanoyl)oxy)heptadecanedioate (L319).

[0045] In some embodiments, a lipid nanoparticle comprises compounds of Formula (I) and/or Formula (II), as discussed below.

[0046] In some embodiments, a lipid nanoparticle comprises Compounds 3, 18, 20, 25, 26, 29, 30, 60, 108-112, or 122, as discussed below.

[0047] In some embodiments, the nanoparticle has a polydispersity value of less than 0.4 (e.g., less than 0.3, 0.2 or 0.1).

[0048] In some embodiments, the nanoparticle has a net neutral charge at a neutral pH value.

[0049] In some embodiments, the virus vaccine is multivalent.

[0050] Some embodiments of the present disclosure provide methods of inducing an antigen specific immune response in a subject, comprising administering to the subject any of the RNA (e.g., mRNA) vaccine as provided herein in an amount effective to produce an antigen-specific immune response. In some embodiments, the RNA (e.g., mRNA) vaccine is a EBOV vaccine or a MARV vaccine. In some embodiments, the RNA (e.g., mRNA) vaccine is a combination vaccine comprising a combination of the foregoing vaccines.

[0051] In some embodiments, an antigen-specific immune response comprises a T cell response or a B cell response.

[0052] In some embodiments, a method of producing an antigen-specific immune response comprises administering to a subject a single dose (no booster dose) of a RNA (e.g., mRNA) vaccine of the present disclosure. In some embodiments, the RNA (e.g., mRNA) vaccine is a EBOV vaccine or a MARV vaccine. In some embodiments, the RNA (e.g., mRNA) vaccine is a combination vaccine comprising a combination of any two or more of the foregoing vaccines.

[0053] In some embodiments, a method further comprises administering to the subject a second (booster) dose of a RNA (e.g., mRNA) vaccine. Additional doses of a RNA (e.g., mRNA) vaccine may be administered.

[0054] In some embodiments, the subjects exhibit a seroconversion rate of at least 80% (e.g., at least 85%, at least 90%, or at least 95%) following the first dose or the second (booster) dose of the vaccine. Seroconversion is the time period during which a specific antibody develops and becomes detectable in the blood. After seroconversion has occurred, a virus can be detected in blood tests for the antibody. During an infection or immunization, antigens enter the blood, and the immune system begins to produce antibodies in response. Before seroconversion, the antigen itself may or may not be detectable, but antibodies are considered absent. During seroconversion, antibodies are present but not yet detectable. Any time after seroconversion, the antibodies can be detected in the blood, indicating a prior or current infection.

[0055] In some embodiments, a RNA (e.g., mRNA) vaccine is administered to a subject by intradermal or intramuscular injection.

[0056] Some embodiments, of the present disclosure provide methods of inducing an antigen specific immune response in a subject, including administering to a subject a RNA (e.g., mRNA) vaccine in an effective amount to produce an antigen specific immune response in a subject. Antigen-specific immune responses in a subject may be determined, in some embodiments, by assaying for antibody titer (for titer of an antibody that binds to an EBOV and/or a MARV antigenic polypeptide) following administration to the subject of any of the RNA (e.g., mRNA) vaccines of the present disclosure. In some embodiments, the anti-antigenic polypeptide antibody titer produced in the subject is increased by at least 1 log relative to a control. In some embodiments, the anti-antigenic polypeptide antibody titer produced in the subject is increased by 1-3 log relative to a control.

[0057] In some embodiments, the anti-antigenic polypeptide antibody titer produced in a subject is increased at least 2 times relative to a control. In some embodiments, the anti-antigenic polypeptide antibody titer produced in the subject is increased at least 5 times relative to a control. In some embodiments, the anti-antigenic polypeptide antibody titer produced in the subject is increased at least 10 times relative to a control. In some embodiments, the anti-antigenic polypeptide antibody titer produced in the subject is increased 2-10 times relative to a control.

[0058] In some embodiments, the control is an anti-antigenic polypeptide antibody titer produced in a subject who has not been administered a RNA (e.g., mRNA) vaccine of the present disclosure. In some embodiments, the control is an anti-antigenic polypeptide antibody titer produced in a subject who has been administered a live attenuated or inactivated EBOV and/or MARV vaccine and/or BetaCoV vaccine (see, e.g., Ren J. et al. J of Gen. Virol. 2015; 96: 1515-1520), or wherein the control is an anti-antigenic polypeptide antibody titer produced in a subject who has been administered a recombinant or purified EBOV and/or MARV protein vaccine. In some embodiments, the control is an anti-antigenic polypeptide antibody titer produced in a subject who has been administered an EBOV and/or MARV virus-like particle (VLP) vaccine (see, e.g., Cox R G et al., J Virol. 2014 June; 88(11): 6368-6379).

[0059] A RNA (e.g., mRNA) vaccine of the present disclosure is administered to a subject in an effective amount (an amount effective to induce an immune response). In some embodiments, the effective amount is a dose equivalent to an at least 2-fold, at least 4-fold, at least 10-fold, at least 100-fold, at least 1000-fold reduction in the standard of care dose of a recombinant EBOV and/or MARV protein vaccine, wherein the anti-antigenic polypeptide antibody titer produced in the subject is equivalent to an anti-antigenic polypeptide antibody titer produced in a control subject administered the standard of care dose of a recombinant EBOV and/or MARV protein vaccine, a purified EBOV and/or MARV protein vaccine, a live attenuated EBOV and/or MARV vaccine, an inactivated EBOV and/or MARV vaccine, or a EBOV and/or MARV VLP vaccine. In some embodiments, the effective amount is a dose equivalent to 2-1000-fold reduction in the standard of care dose of a recombinant EBOV and/or MARV protein vaccine, wherein the anti-antigenic polypeptide antibody titer produced in the subject is equivalent to an anti-antigenic polypeptide antibody titer produced in a control subject administered the standard of care dose of a recombinant EBOV and/or MARV protein vaccine, a purified EBOV and/or MARV protein vaccine, a live attenuated EBOV and/or MARV vaccine, an inactivated EBOV and/or MARV vaccine, or a EBOV and/or MARV VLP vaccine.

[0060] In some embodiments, the control is an anti-antigenic polypeptide antibody titer produced in a subject who has been administered a virus-like particle (VLP) vaccine comprising structural proteins of EBOV and/or MARV.

[0061] A nucleic acid vaccine having one or more RNA polynucleotides having an open reading frame encoding an Ebola antigen and/or Marburg virus and a pharmaceutically acceptable carrier or excipient are provided in aspects of the invention. In some embodiments the Ebola antigen is an Ebola virus (EBOV) glycoprotein (GP). In other embodiments the Ebola antigen is a surface GP. In yet other embodiments the Ebola antigen is a wild type EBOV pro-GP, a wild type EBOV pro-GP-V5, a mature EBOV GP, a mature EBOV GP-V5, a secreted wild type EBOV pro-GP, a secreted wild type EBOV pro-GP-V5, a secreted mature EBOV GP, or a secreted mature EBOV GP-V5. In some embodiments the Marburg antigen is a Marburg virus (MARV) glycoprotein (GP). In other embodiments the Marburg antigen is a surface GP.

[0062] In some embodiments, the efficacy (or effectiveness) of a RNA (e.g., mRNA) vaccine is greater than 60%. In some embodiments, the RNA (e.g., mRNA) polynucleotide of the vaccine at least one EBOV antigenic polypeptide, at least one MARV antigenic polypeptide, or a combination of the foregoing antigenic polypeptides.

[0063] Vaccine efficacy may be assessed using standard analyses (see, e.g., Weinberg et al., J Infect Dis. 2010 Jun. 1; 201(11):1607-10). For example, vaccine efficacy may be measured by double-blind, randomized, clinical controlled trials. Vaccine efficacy may be expressed as a proportionate reduction in disease attack rate (AR) between the unvaccinated (ARU) and vaccinated (ARV) study cohorts and can be calculated from the relative risk (RR) of disease among the vaccinated group with use of the following formulas:

Efficacy=(ARU−ARV)/ARU×100; and

Efficacy=(1−RR)×100.

[0064] Likewise, vaccine effectiveness may be assessed using standard analyses (see, e.g., Weinberg et al., J Infect Dis. 2010 Jun. 1; 201(11):1607-10). Vaccine effectiveness is an assessment of how a vaccine (which may have already proven to have high vaccine efficacy) reduces disease in a population. This measure can assess the net balance of benefits and adverse effects of a vaccination program, not just the vaccine itself, under natural field conditions rather than in a controlled clinical trial. Vaccine effectiveness is proportional to vaccine efficacy (potency) but is also affected by how well target groups in the population are immunized, as well as by other non-vaccine-related factors that influence the ‘real-world’ outcomes of hospitalizations, ambulatory visits, or costs. For example, a retrospective case control analysis may be used, in which the rates of vaccination among a set of infected cases and appropriate controls are compared. Vaccine effectiveness may be expressed as a rate difference, with use of the odds ratio (OR) for developing infection despite vaccination:

Effectiveness=(1−OR)×100.

[0065] In some embodiments, the efficacy (or effectiveness) of a RNA (e.g., mRNA) vaccine is at least 65%, at least 70%, at least 75%, at least 80%, at least 85%, or at least 90%.

[0066] In some embodiments, the vaccine immunizes the subject against EBOV, MARV, or a combination of the foregoing viruses for up to 2 years. In some embodiments, the vaccine immunizes the subject against EBOV, MARV, or a combination of the foregoing viruses for more than 2 years, more than 3 years, more than 4 years, or for 5-10 years.

[0067] In some embodiments, the subject is about 5 years old or younger. For example, the subject may be between the ages of about 1 year and about 5 years (e.g., about 1, 2, 3, 5 or 5 years), or between the ages of about 6 months and about 1 year (e.g., about 6, 7, 8, 9, 10, 11 or 12 months). In some embodiments, the subject is about 12 months or younger (e.g., 12, 11, 10, 9, 8, 7, 6, 5, 4, 3, 2 months or 1 month). In some embodiments, the subject is about 6 months or younger.

[0068] In some embodiments, the subject was born full term (e.g., about 37-42 weeks). In some embodiments, the subject was born prematurely, for example, at about 36 weeks of gestation or earlier (e.g., about 36, 35, 34, 33, 32, 31, 30, 29, 28, 27, 26 or 25 weeks). For example, the subject may have been born at about 32 weeks of gestation or earlier. In some embodiments, the subject was born prematurely between about 32 weeks and about 36 weeks of gestation. In such subjects, a RNA (e.g., mRNA) vaccine may be administered later in life, for example, at the age of about 6 months to about 5 years, or older.

[0069] In some embodiments, the subject is pregnant (e.g., in the first, second or third trimester) when administered an RNA (e.g., mRNA) vaccine. Thus, the present disclosure provides RNA (e.g., mRNA) vaccines for maternal immunization to improve mother-to-child transmission of protection against the virus.

[0070] In some embodiments, the subject is a young adult between the ages of about 20 years and about 50 years (e.g., about 20, 25, 30, 35, 40, 45 or 50 years old).

[0071] In some embodiments, the subject is an elderly subject about 60 years old, about 70 years old, or older (e.g., about 60, 65, 70, 75, 80, 85 or 90 years old).

[0072] In some embodiments, the subject is has a chronic pulmonary disease (e.g., chronic obstructive pulmonary disease (COPD) or asthma). Two forms of COPD include chronic bronchitis, which involves a long-term cough with mucus, and emphysema, which involves damage to the lungs over time. Thus, a subject administered a RNA (e.g., mRNA) vaccine may have chronic bronchitis or emphysema.

[0073] In some embodiments, the subject has been exposed to EBOV, MARV, or both viruses; the subject is infected with EBOV, MARV, or both viruses; or subject is at risk of infection by EBOV, MARV, or both viruses.

[0074] In some embodiments, the subject is immunocompromised (has an impaired immune system, e.g., has an immune disorder or autoimmune disorder).

[0075] In some embodiments the nucleic acid vaccines described herein are chemically modified. In other embodiments the nucleic acid vaccines are unmodified.

[0076] Yet other aspects provide compositions for and methods of vaccinating a subject comprising administering to the subject a nucleic acid vaccine comprising one or more RNA polynucleotides having an open reading frame encoding a first virus antigenic polypeptide, wherein the RNA polynucleotide does not include a stabilization element, and wherein an adjuvant is not coformulated or co-administered with the vaccine.

[0077] In some embodiments, the nucleic acid vaccine is administered to the subject by intradermal or intramuscular injection. In some embodiments, the nucleic acid vaccine is administered to the subject on day zero. In some embodiments, a second dose of the nucleic acid vaccine is administered to the subject on day twenty one.

[0078] In some embodiments, a dosage of 25 micrograms of the RNA polynucleotide is included in the nucleic acid vaccine administered to the subject. In some embodiments, a dosage of 100 micrograms of the RNA polynucleotide is included in the nucleic acid vaccine administered to the subject. In some embodiments, a dosage of 50 micrograms of the RNA polynucleotide is included in the nucleic acid vaccine administered to the subject. In some embodiments, a dosage of 75 micrograms of the RNA polynucleotide is included in the nucleic acid vaccine administered to the subject. In some embodiments, a dosage of 150 micrograms of the RNA polynucleotide is included in the nucleic acid vaccine administered to the subject. In some embodiments, a dosage of 400 micrograms of the RNA polynucleotide is included in the nucleic acid vaccine administered to the subject. In some embodiments, a dosage of 200 micrograms of the RNA polynucleotide is included in the nucleic acid vaccine administered to the subject. In some embodiments, the RNA polynucleotide accumulates at a 100 fold higher level in the local lymph node in comparison with the distal lymph node. In other embodiments the nucleic acid vaccine is chemically modified and in other embodiments the nucleic acid vaccine is not chemically modified.

[0079] Aspects of the invention provide a nucleic acid vaccine comprising one or more RNA polynucleotides having an open reading frame encoding a first antigenic polypeptide, wherein the RNA polynucleotide does not include a stabilization element, and a pharmaceutically acceptable carrier or excipient, wherein an adjuvant is not included in the vaccine. In some embodiments, the stabilization element is a histone stem-loop. In some embodiments, the stabilization element is a nucleic acid sequence having increased GC content relative to wild type sequence.

[0080] Aspects provide nucleic acid vaccines comprising one or more RNA polynucleotides having an open reading frame comprising at least one chemical modification or optionally no nucleotide modification, the open reading frame encoding a first antigenic polypeptide, wherein the RNA polynucleotide is present in the formulation for in vivo administration to a host such that the level of antigen expression in the host significantly exceeds a level of antigen expression produced by an mRNA vaccine having a stabilizing element or formulated with an adjuvant and encoding the first antigenic polypeptide.

[0081] Other aspects provide nucleic acid vaccines comprising one or more RNA polynucleotides having an open reading frame comprising at least one chemical modification or optionally no nucleotide modification, the open reading frame encoding a first antigenic polypeptide, wherein the vaccine has at least 10 fold less RNA polynucleotide than is required for an unmodified mRNA vaccine to produce an equivalent antibody titer. In some embodiments, the RNA polynucleotide is present in a dosage of 25-100 micrograms.

[0082] Aspects of the invention provide methods of creating, maintaining or restoring antigenic memory to a virus strain in an individual or population of individuals comprising administering to said individual or population an antigenic memory booster nucleic acid vaccine comprising (a) at least one RNA polynucleotide, said polynucleotide comprising at least one chemical modification or optionally no nucleotide modification and two or more codon-optimized open reading frames, said open reading frames encoding a set of reference antigenic polypeptides, and (b) optionally a pharmaceutically acceptable carrier or excipient. In some embodiments, the vaccine is administered to the individual via a route selected from the group consisting of intramuscular administration, intradermal administration and subcutaneous administration. In some embodiments, the administering step comprises contacting a muscle tissue of the subject with a device suitable for injection of the composition. In some embodiments, the administering step comprises contacting a muscle tissue of the subject with a device suitable for injection of the composition in combination with electroporation.

[0083] Other aspects provide nucleic acid vaccines comprising an LNP formulated RNA polynucleotide having an open reading frame comprising no nucleotide modifications (unmodified), the open reading frame encoding a first antigenic polypeptide, wherein the vaccine has at least 10 fold less RNA polynucleotide than is required for an unmodified mRNA vaccine not formulated in a LNP to produce an equivalent antibody titer. In some embodiments, the RNA polynucleotide is present in a dosage of 25-100 micrograms.

[0084] In other aspects the invention encompasses a method of treating an elderly subject age 60 years or older comprising administering to the subject a nucleic acid vaccine comprising one or more RNA polynucleotides having an open reading frame encoding a virus antigenic polypeptide in an effective amount to vaccinate the subject.

[0085] In other aspects the invention encompasses a method of treating a young subject age 17 years or younger comprising administering to the subject a nucleic acid vaccine comprising one or more RNA polynucleotides having an open reading frame encoding a virus antigenic polypeptide in an effective amount to vaccinate the subject.

[0086] In other aspects the invention encompasses a method of treating an adult subject comprising administering to the subject a nucleic acid vaccine comprising one or more RNA polynucleotides having an open reading frame encoding a virus antigenic polypeptide in an effective amount to vaccinate the subject.

[0087] In some aspects the invention is a method of vaccinating a subject with a combination vaccine including at least two nucleic acid sequences encoding antigens wherein the dosage for the vaccine is a combined therapeutic dosage wherein the dosage of each individual nucleic acid encoding an antigen is a sub therapeutic dosage. In some embodiments, the combined dosage is 25 micrograms of the RNA polynucleotide in the nucleic acid vaccine administered to the subject. In some embodiments, the combined dosage is 100 micrograms of the RNA polynucleotide in the nucleic acid vaccine administered to the subject. In some embodiments the combined dosage is 50 micrograms of the RNA polynucleotide in the nucleic acid vaccine administered to the subject. In some embodiments, the combined dosage is 75 micrograms of the RNA polynucleotide in the nucleic acid vaccine administered to the subject. In some embodiments, the combined dosage is 150 micrograms of the RNA polynucleotide in the nucleic acid vaccine administered to the subject. In some embodiments, the combined dosage is 400 micrograms of the RNA polynucleotide in the nucleic acid vaccine administered to the subject. In some embodiments, the sub therapeutic dosage of each individual nucleic acid encoding an antigen is 1, 2, 3, 4, 5, 6, 7, 8, 9, 10, 11, 12, 13, 14, 15, 16, 17, 18, 19, or 20 micrograms or any range combination thereof. In other embodiments the nucleic acid vaccine is chemically modified and in other embodiments the nucleic acid vaccine is not chemically modified.

[0088] The RNA polynucleotide is from Tables 6, 8, or 12 and includes at least one chemical modification. In other embodiments the RNA polynucleotide is from Tables 6, 8, or 12 and does not include any nucleotide modifications, or is unmodified. In yet other embodiments the at least one RNA polynucleotide encodes an antigenic protein of Tables 5 or 10 and includes at least one chemical modification. In other embodiments the RNA polynucleotide encodes an antigenic protein of Tables 5 or 10 and does not include any nucleotide modifications, or is unmodified.

[0089] In preferred aspects, vaccines of the invention (e.g., LNP-encapsulated mRNA vaccines) produce prophylactically- and/or therapeutically-efficacious levels, concentrations and/or titers of antigen-specific antibodies in the blood or serum of a vaccinated subject. As defined herein, the term antibody titer refers to the amount of antigen-specific antibody produces in s subject, e.g., a human subject. In exemplary embodiments, antibody titer is expressed as the inverse of the greatest dilution (in a serial dilution) that still gives a positive result. In exemplary embodiments, antibody titer is determined or measured by enzyme-linked immunosorbent assay (ELISA). In exemplary embodiments, antibody titer is determined or measured by neutralization assay, e.g., by microneutralization assay. In certain aspects, antibody titer measurement is expressed as a ratio, such as 1:40, 1:100, etc.

[0090] Each of the limitations of the invention can encompass various embodiments of the invention. It is, therefore, anticipated that each of the limitations of the invention involving any one element or combinations of elements can be included in each aspect of the invention. This invention is not limited in its application to the details of construction and the arrangement of components set forth in the following description or illustrated in the drawings. The invention is capable of other embodiments and of being practiced or of being carried out in various ways.

### BRIEF DESCRIPTION OF THE DRAWINGS

[0091] The foregoing and other objects, features and advantages will be apparent from the following description of particular embodiments of the invention, as illustrated in the accompanying drawings in which like reference characters refer to the same parts throughout the different views. The drawings are not necessarily to scale, emphasis instead being placed upon illustrating the principles of various embodiments of the invention.

[0092] FIG. 1 shows a schematic depiction of the structure of Ebola glycoprotein (GP) and antigen constructs.

[0093] FIG. 2 shows the study design for the immunogenicity evaluation.

[0094] FIG. 3 is a graph depicting the initial anti-Ebola GP response at Day 10 after a single primary challenge. The positive control indicates the OD of the standard curve from 10 U/ml to 1 U/ml of mouse anti-Ebola GP mAb.

[0095] FIG. 4 shows the anti-Ebola GP antibody titer of selected antigens on Day 21 and Day 23 (n=3 animals per group).

[0096] FIG. 5 shows the anti-Ebola GP response at Day 21 post-vaccination.

[0097] FIG. 6 shows the in vitro neutralization activity of serum samples in the DeltaVp30 Ebola virus system.

[0098] FIG. 7 shows a schematic of an Ebola vaccine study in a Guinea Pig model.

[0099] FIG. 8 is a set of graphs depicting data in terms of survival, weight, temperature and score from the vaccination study shown in FIG. 7. Vaccination conferred 100% protection against 10E3 PFUs of gp-adapted Ebola (Zaire species, Mayinga strain).

[0100] FIG. 9 is a graph showing the in vivo neutralization activity of different mRNA constructs from three strains: Uganda (group 8), Ravin (group 9), and Musoke (group 10).

### DETAILED DESCRIPTION

[0101] Embodiments of the present disclosure provide RNA (e.g., mRNA) vaccines that include polynucleotide encoding an Ebola virus and/or a Marburg virus antigen. Ebola virus and/or Marburg RNA vaccines, as provided herein may be used to induce a balanced immune response, comprising both cellular and humoral immunity, without many of the risks associated with DNA vaccination.

[0102] The invention involves, in some aspects, the surprising finding that lipid nanoparticle (LNP) formulations significantly enhance the effectiveness of mRNA vaccines, including chemically modified and unmodified mRNA vaccines.

[0103] In addition to providing an enhanced immune response, the formulations of the invention generate a more rapid immune response with fewer doses of antigen than other vaccines. The mRNA-LNP formulations of the invention also produce quantitatively and qualitatively better immune responses than vaccines formulated in different carriers.

[0104] It was discovered quite surprisingly, according to the invention that vaccination with the mRNA vaccine of the invention conferred 100% protection against 10E3 PFUs of gp-adapted Ebola (Zaire species, Mayinga strain) in a guinea pig model of Ebola virus infection. In contrast to the vaccines of the invention, untreated animals succumbed to the infection completely by day 10 post infection.

[0105] In some embodiments, the amino acid sequence of the Ebola antigen or fragment thereof comprises at least 90%, 91%, 92%, 93%, 94%, 95%, 96%, 97% 98%, or 99% identity with any of the amino acid sequences provided in Tables 3, 5 and 9. In other embodiments, the nucleic acid sequence of the mRNA encoding the Ebola antigen or fragment thereof comprises at least 90%, 91%, 92%, 93%, 94%, 95%, 96%, 97% 98%, or 99% identity with any of the nucleic acid sequences provided in Tables 3, 4 and 7. In other embodiments, the nucleic acid sequence of the mRNA encoding the Ebola antigen or fragment thereof is encoded by a nucleic acid sequence comprising at least 90%, 91%, 92%, 93%, 94%, 95%, 96%, 97% 98%, or 99% identity with any of the nucleic acid sequences provided in Tables 3, 4 and 7.

[0106] In some embodiments, the amino acid sequence of the Marburg antigen or fragment thereof comprises at least 90%, 91%, 92%, 93%, 94%, 95%, 96%, 97% 98%, or 99% identify with any of the amino acid sequences provided in Table 10. In other embodiments, the nucleic acid sequence of the mRNA encoding the Marburg antigen or fragment thereof comprises at least 90%, 91%, 92%, 93%, 94%, 95%, 96%, 97% 98%, or 99% identity with any of the nucleic acid sequences provided in Table 11. In other embodiments, the nucleic acid sequence of the mRNA encoding the Marburg antigen or fragment thereof is encoded by a nucleic acid sequence comprising at least 90%, 91%, 92%, 93%, 94%, 95%, 96%, 97% 98%, or 99% identity with any of the nucleic acid sequences provided in Table 11.

[0107] Thus, the RNA (e.g., mRNA) vaccines of the present invention comprise one or more polynucleotides, e.g., polynucleotide constructs, which encode one or more wild type or engineered antigens. Exemplary polynucleotides, e.g., polynucleotide constructs, include antigen-encoding mRNA polynucleotides. In an exemplary aspect, polynucleotides of the invention, e.g., antigen-encoding RNA polynucleotides, may include at least one chemical modification. In exemplary aspects, polynucleotides of the invention, e.g., antigen-encoding RNA polynucleotides, may be fully modified (e.g., chemically modified) with respect to one or more nucleobases.

[0108] In some embodiments, the RNA vaccine of the invention is a polynucleotide encoding an Ebola virus antigen. There are five Ebola viruses within the genus Ebolavirus. Four of the five known ebolaviruses cause a severe and often fatal hemorrhagic fever in humans and other mammals, known as Ebola virus disease (EVD). The Ebola glycoprotein (GP) is the only virally expressed protein on the virion surface, where it is essential for the attachment to host cells and catalyzes membrane fusion. As a result, the Ebola GP is a critical component of vaccines, as well as a target of neutralizing antibodies and inhibitors of attachment and fusion. Pre-GP is cleaved by furin at a multi-basic motif into two subunits, GP1 and GP2, which remain associated through a disulfide linkage between Cys53 of GP1 and Cys609 of GP2. The heterodimer (GP1 and GP2) then assembles into a 450-kDa trimer (3 GP1 and 3 GP2) at the surface of nascent virions, where it exerts its functions.

[0109] In some embodiments the Ebola antigen in the nucleic acid vaccine is an EBOV glycoprotein (GP). In other embodiments the Ebola antigen is a surface GP. Exemplary Ebola GP and antigen constructs tested herein are shown in FIG. 1 and Table 1.

[0110] The Ebola antigen may be a wild type EBOV pro-GP or a mature EBOV GP. “Mature” EBOV GP has been engineered to include a human signal peptide. Alternatively the Ebola antigen may be a secreted wild type EBOV pro-GP or mature EBOV GP. “Secreted” EBOV GP has been engineered to remove the transmembrane domain, i.e., residues 651-676. The constructs may also include V5.

[0111] Existing Ebola vaccines include conventional inactivated (by heat, formalin, or γ-irradiation) viral vaccines, sub-unit Ebola virus genes inserted into a DNA plasmid and Virus-like-particles (VLP) based on VP40 alone or with GP. Studies using conventional inactivated and DNA vaccines have shown consistently low survival rates in non-human primates. The mRNA Ebola vaccines of the invention have unique advantages over conventional vaccines. As shown in the data presented in the Examples the constructs of the invention provided 100% protection against infection in an animal model of Ebola.

[0112] The fourth gene of the Ebola genome encodes a 160-kDa envelope-attached glycoprotein (GP) and a 110 kDa secreted glycoprotein (sGP). Both GP and sGP have an identical 295-residue N-terminus, however, they have different C-terminal sequences. GP is a class I fusion protein which assembles as trimers on viral surface and plays an important role in virus entry and attachment. Mature GP is a disulfide-linked heterodimer formed by two subunits, GP1 and GP2, which are generated from the proteolytic process of GP precursor (pre-GP) by cellular furin during virus assembly. The GP1 subunit contains a mucin domain (Muc) and a receptor-binding domain (RBD); the GP2 subunit has a fusion peptide, a helical heptad-repeat (HR) region, a transmembrane (TM) domain, and a 4-residue cytoplasmic tail. The RBD of GP1 mediates the interaction of Ebola virus with cellular receptors such as DC-SIGN/LSIGN, TIM-1, hMGL, NPC1, β-integrins, folate receptor-α, and Tyro3 family receptors. The mucin domain has N- and O-linked glycans and enhances the viral attachment to cellular hMGL, and participates in shielding key neutralization epitopes, which helps the virus evade host immune responses.

[0113] The entire contents of International Application No. PCT/US2015/02740 is incorporated herein by reference.

### Nucleic Acids/Polynucleotides

[0114] Ebola virus and/or Marburg virus vaccines, as provided herein, comprise at least one (one or more) RNA (e.g., mRNA) polynucleotide having an open reading frame encoding at least one Ebola virus and/or Marburg virus antigenic polypeptide. The term “nucleic acid,” in its broadest sense, includes any compound and/or substance that comprises a polymer of nucleotides. These polymers are referred to as polynucleotides.

[0115] Nucleic acids (also referred to as polynucleotides) may be or may include, for example, RNAs, deoxyribonucleic acids (DNAs), threose nucleic acids (TNAs), glycol nucleic acids (GNAs), peptide nucleic acids (PNAs), locked nucleic acids (LNAs, including LNA having a β-D-ribo configuration, α-LNA having an α-L-ribo configuration (a diastereomer of LNA), 2′-amino-LNA having a 2′-amino functionalization, and 2′-amino-α-LNA having a 2′-amino functionalization), ethylene nucleic acids (ENA), cyclohexenyl nucleic acids (CeNA) or chimeras or combinations thereof.

[0116] In some embodiments, polynucleotides of the present disclosure function as messenger RNA (mRNA). “Messenger RNA” (mRNA) refers to any polynucleotide that encodes a (at least one) polypeptide (a naturally-occurring, non-naturally-occurring, or modified polymer of amino acids) and can be translated to produce the encoded polypeptide in vitro, in vivo, in situ or ex vivo.

[0117] The basic components of an mRNA molecule typically include at least one coding region, a 5′ untranslated region (UTR), a 3′ UTR, a 5′ cap and a poly-A tail. Polynucleotides of the present disclosure may function as mRNA but can be distinguished from wild-type mRNA in their functional and/or structural design features which serve to overcome existing problems of effective polypeptide expression using nucleic-acid based therapeutics.

[0118] In some embodiments, a RNA polynucleotide of an Ebola virus and/or Marburg virus vaccine encodes 2-10, 2-9, 2-8, 2-7, 2-6, 2-5, 2-4, 2-3, 3-10, 3-9, 3-8, 3-7, 3-6, 3-5, 3-4, 4-10, 4-9, 4-8, 4-7, 4-6, 4-5, 5-10, 5-9, 5-8, 5-7, 5-6, 6-10, 6-9, 6-8, 6-7, 7-10, 7-9, 7-8, 8-10, 8-9 or 9-10 antigenic polypeptides. In some embodiments, a RNA polynucleotide of an Ebola virus and/or Marburg virus vaccine encodes at least 10, 20, 30, 40, 50, 60, 70, 80, 90 or 100 antigenic polypeptides. In some embodiments, a RNA polynucleotide of an Ebola virus and/or Marburg virus vaccine encodes at least 100 or at least 200 antigenic polypeptides. In some embodiments, a RNA polynucleotide of an Ebola virus and/or Marburg vaccine encodes 1-10, 5-15, 10-20, 15-25, 20-30, 25-35, 30-40, 35-45, 40-50, 1-50, 1-100, 2-50 or 2-100 antigenic polypeptides.

### Antigens/Antigenic Polypeptides

[0119] In some embodiments, an Ebola virus or a Marburg virus antigenic polypeptide is longer than 25 amino acids and shorter than 50 amino acids. Thus, polypeptides include gene products, naturally occurring polypeptides, synthetic polypeptides, homologs, orthologs, paralogs, fragments and other equivalents, variants, and analogs of the foregoing. A polypeptide may be a single molecule or may be a multi-molecular complex such as a dimer, trimer or tetramer. Polypeptides may also comprise single chain or multichain polypeptides such as antibodies or insulin and may be associated or linked. Most commonly, disulfide linkages are found in multichain polypeptides. The term polypeptide may also apply to amino acid polymers in which at least one amino acid residue is an artificial chemical analogue of a corresponding naturally-occurring amino acid.

[0120] The term “polypeptide variant” refers to molecules which differ in their amino acid sequence from a native or reference sequence. The amino acid sequence variants may possess substitutions, deletions, and/or insertions at certain positions within the amino acid sequence, as compared to a native or reference sequence. Ordinarily, variants possess at least 50% identity to a native or reference sequence. In some embodiments, variants share at least 80%, or at least 90% identity with a native or reference sequence.

[0121] In some embodiments “variant mimics” are provided. As used herein, the term “variant mimic” is one which contains at least one amino acid that would mimic an activated sequence. For example, glutamate may serve as a mimic for phosphoro-threonine and/or phosphoro-serine. Alternatively, variant mimics may result in deactivation or in an inactivated product containing the mimic, for example, phenylalanine may act as an inactivating substitution for tyrosine; or alanine may act as an inactivating substitution for serine.

[0122] “Orthologs” refers to genes in different species that evolved from a common ancestral gene by speciation. Normally, orthologs retain the same function in the course of evolution. Identification of orthologs is critical for reliable prediction of gene function in newly sequenced genomes.

[0123] “Analogs” is meant to include polypeptide variants which differ by one or more amino acid alterations, for example, substitutions, additions or deletions of amino acid residues that still maintain one or more of the properties of the parent or starting polypeptide.

[0124] The present disclosure provides several types of compositions that are polynucleotide or polypeptide based, including variants and derivatives. These include, for example, substitutional, insertional, deletion and covalent variants and derivatives. The term “derivative” is used synonymously with the term “variant” but generally refers to a molecule that has been modified and/or changed in any way relative to a reference molecule or starting molecule.

[0125] As such, polynucleotides encoding peptides or polypeptides containing substitutions, insertions and/or additions, deletions and covalent modifications with respect to reference sequences, in particular the polypeptide sequences disclosed herein, are included within the scope of this disclosure. For example, sequence tags or amino acids, such as one or more lysines, can be added to peptide sequences (e.g., at the N-terminal or C-terminal ends). Sequence tags can be used for peptide detection, purification or localization. Lysines can be used to increase peptide solubility or to allow for biotinylation. Alternatively, amino acid residues located at the carboxy and amino terminal regions of the amino acid sequence of a peptide or protein may optionally be deleted providing for truncated sequences. Certain amino acids (e.g., C-terminal or N-terminal residues) may alternatively be deleted depending on the use of the sequence, as for example, expression of the sequence as part of a larger sequence which is soluble, or linked to a solid support.

[0126] “Substitutional variants” when referring to polypeptides are those that have at least one amino acid residue in a native or starting sequence removed and a different amino acid inserted in its place at the same position. Substitutions may be single, where only one amino acid in the molecule has been substituted, or they may be multiple, where two or more amino acids have been substituted in the same molecule.

[0127] As used herein the term “conservative amino acid substitution” refers to the substitution of an amino acid that is normally present in the sequence with a different amino acid of similar size, charge, or polarity. Examples of conservative substitutions include the substitution of a non-polar (hydrophobic) residue such as isoleucine, valine and leucine for another non-polar residue. Likewise, examples of conservative substitutions include the substitution of one polar (hydrophilic) residue for another such as between arginine and lysine, between glutamine and asparagine, and between glycine and serine. Additionally, the substitution of a basic residue such as lysine, arginine or histidine for another, or the substitution of one acidic residue such as aspartic acid or glutamic acid for another acidic residue are additional examples of conservative substitutions. Examples of non-conservative substitutions include the substitution of a non-polar (hydrophobic) amino acid residue such as isoleucine, valine, leucine, alanine, methionine for a polar (hydrophilic) residue such as cysteine, glutamine, glutamic acid or lysine and/or a polar residue for a non-polar residue.

[0128] “Features” when referring to polypeptide or polynucleotide are defined as distinct amino acid sequence-based or nucleotide-based components of a molecule respectively. Features of the polypeptides encoded by the polynucleotides include surface manifestations, local conformational shape, folds, loops, half-loops, domains, half-domains, sites, termini or any combination thereof.

[0129] As used herein when referring to polypeptides the term “domain” refers to a motif of a polypeptide having one or more identifiable structural or functional characteristics or properties (e.g., binding capacity, serving as a site for protein-protein interactions).

[0130] As used herein when referring to polypeptides the terms “site” as it pertains to amino acid based embodiments is used synonymously with “amino acid residue” and “amino acid side chain.” As used herein when referring to polynucleotides the terms “site” as it pertains to nucleotide based embodiments is used synonymously with “nucleotide.” A site represents a position within a peptide or polypeptide or polynucleotide that may be modified, manipulated, altered, derivatized or varied within the polypeptide or polynucleotide based molecules.

[0131] As used herein the terms “termini” or “terminus” when referring to polypeptides or polynucleotides refers to an extremity of a polypeptide or polynucleotide respectively. Such extremity is not limited only to the first or final site of the polypeptide or polynucleotide but may include additional amino acids or nucleotides in the terminal regions. Polypeptide-based molecules may be characterized as having both an N-terminus (terminated by an amino acid with a free amino group (NH2)) and a C-terminus (terminated by an amino acid with a free carboxyl group (COOH)). Proteins are in some cases made up of multiple polypeptide chains brought together by disulfide bonds or by non-covalent forces (multimers, oligomers). These proteins have multiple N- and C-termini. Alternatively, the termini of the polypeptides may be modified such that they begin or end, as the case may be, with a non-polypeptide based moiety such as an organic conjugate.

[0132] As recognized by those skilled in the art, protein fragments, functional protein domains, and homologous proteins are also considered to be within the scope of polypeptides of interest. For example, provided herein is any protein fragment (meaning a polypeptide sequence at least one amino acid residue shorter than a reference polypeptide sequence but otherwise identical) of a reference protein 10, 20, 30, 40, 50, 60, 70, 80, 90, 100 or greater than 100 amino acids in length. In another example, any protein that includes a stretch of 20, 30, 40, 50, or 100 amino acids which are 40%, 50%, 60%, 70%, 80%, 90%, 95%, or 100% identical to any of the sequences described herein can be utilized in accordance with the disclosure. In some embodiments, a polypeptide includes 2, 3, 4, 5, 6, 7, 8, 9, 10, or more mutations as shown in any of the sequences provided or referenced herein. In another example, any protein that includes a stretch of 20, 30, 40, 50, or 100 amino acids that are greater than 80%, 90%, 95%, or 100% identical to any of the sequences described herein, wherein the protein has a stretch of 5, 10, 15, 20, 25, or 30 amino acids that are less than 80%, 75%, 70%, 65% or 60% identical to any of the sequences described herein can be utilized in accordance with the disclosure.

[0133] Polypeptide or polynucleotide molecules of the present disclosure may share a certain degree of sequence similarity or identity with the reference molecules (e.g., reference polypeptides or reference polynucleotides), for example, with art-described molecules (e.g., engineered or designed molecules or wild-type molecules). The term “identity” as known in the art, refers to a relationship between the sequences of two or more polypeptides or polynucleotides, as determined by comparing the sequences. In the art, identity also means the degree of sequence relatedness between them as determined by the number of matches between strings of two or more amino acid residues or nucleic acid residues. Identity measures the percent of identical matches between the smaller of two or more sequences with gap alignments (if any) addressed by a particular mathematical model or computer program (e.g., “algorithms”). Identity of related peptides can be readily calculated by known methods. “% identity” as it applies to polypeptide or polynucleotide sequences is defined as the percentage of residues (amino acid residues or nucleic acid residues) in the candidate amino acid or nucleic acid sequence that are identical with the residues in the amino acid sequence or nucleic acid sequence of a second sequence after aligning the sequences and introducing gaps, if necessary, to achieve the maximum percent identity. Methods and computer programs for the alignment are well known in the art. It is understood that identity depends on a calculation of percent identity but may differ in value due to gaps and penalties introduced in the calculation. Generally, variants of a particular polynucleotide or polypeptide have at least 40%, 45%, 50%, 55%, 60%, 65%, 70%, 75%, 80%, 85%, 90%, 91%, 92%, 93%, 94%, 95%, 96%, 97%, 98%, 99% but less than 100% sequence identity to that particular reference polynucleotide or polypeptide as determined by sequence alignment programs and parameters described herein and known to those skilled in the art. Such tools for alignment include those of the BLAST suite (Stephen F. Altschul, et al (1997), “Gapped BLAST and PSI-BLAST: a new generation of protein database search programs”, Nucleic Acids Res. 25:3389-3402). Another popular local alignment technique is based on the Smith-Waterman algorithm (Smith, T. F. & Waterman, M. S. (1981) “Identification of common molecular subsequences.” J. Mol. Biol. 147:195-197). A general global alignment technique based on dynamic programming is the Needleman-Wunsch algorithm (Needleman, S. B. & Wunsch, C. D. (1970) “A general method applicable to the search for similarities in the amino acid sequences of two proteins.” J. Mol. Biol. 48:443-453.). More recently a Fast Optimal Global Sequence Alignment Algorithm (FOGSAA) has been developed that purportedly produces global alignment of nucleotide and protein sequences faster than other optimal global alignment methods, including the Needleman-Wunsch algorithm. Other tools are described herein, specifically in the definition of “identity” below.

[0134] As used herein, the term “homology” refers to the overall relatedness between polymeric molecules, e.g. between nucleic acid molecules (e.g. DNA molecules and/or RNA molecules) and/or between polypeptide molecules. Polymeric molecules (e.g. nucleic acid molecules (e.g. DNA molecules and/or RNA molecules) and/or polypeptide molecules) that share a threshold level of similarity or identity determined by alignment of matching residues are termed homologous. Homology is a qualitative term that describes a relationship between molecules and can be based upon the quantitative similarity or identity. Similarity or identity is a quantitative term that defines the degree of sequence match between two compared sequences. In some embodiments, polymeric molecules are considered to be “homologous” to one another if their sequences are at least 25%, 30%, 35%, 40%, 45%, 50%, 55%, 60%, 65%, 70%, 75%, 80%, 85%, 90%, 95%, or 99% identical or similar. The term “homologous” necessarily refers to a comparison between at least two sequences (polynucleotide or polypeptide sequences). Two polynucleotide sequences are considered homologous if the polypeptides they encode are at least 50%, 60%, 70%, 80%, 90%, 95%, or even 99% for at least one stretch of at least 20 amino acids. In some embodiments, homologous polynucleotide sequences are characterized by the ability to encode a stretch of at least 4-5 uniquely specified amino acids. For polynucleotide sequences less than 60 nucleotides in length, homology is determined by the ability to encode a stretch of at least 4-5 uniquely specified amino acids. Two protein sequences are considered homologous if the proteins are at least 50%, 60%, 70%, 80%, or 90% identical for at least one stretch of at least 20 amino acids.

[0135] Homology implies that the compared sequences diverged in evolution from a common origin. The term “homolog” refers to a first amino acid sequence or nucleic acid sequence (e.g., gene (DNA or RNA) or protein sequence) that is related to a second amino acid sequence or nucleic acid sequence by descent from a common ancestral sequence. The term “homolog” may apply to the relationship between genes and/or proteins separated by the event of speciation or to the relationship between genes and/or proteins separated by the event of genetic duplication. “Orthologs” are genes (or proteins) in different species that evolved from a common ancestral gene (or protein) by speciation. Typically, orthologs retain the same function in the course of evolution. “Paralogs” are genes (or proteins) related by duplication within a genome. Orthologs retain the same function in the course of evolution, whereas paralogs evolve new functions, even if these are related to the original one.

[0136] The term “identity” refers to the overall relatedness between polymeric molecules, for example, between polynucleotide molecules (e.g. DNA molecules and/or RNA molecules) and/or between polypeptide molecules. Calculation of the percent identity of two polynucleic acid sequences, for example, can be performed by aligning the two sequences for optimal comparison purposes (e.g., gaps can be introduced in one or both of a first and a second nucleic acid sequences for optimal alignment and non-identical sequences can be disregarded for comparison purposes). In certain embodiments, the length of a sequence aligned for comparison purposes is at least 30%, at least 40%, at least 50%, at least 60%, at least 70%, at least 80%, at least 90%, at least 95%, or 100% of the length of the reference sequence. The nucleotides at corresponding nucleotide positions are then compared. When a position in the first sequence is occupied by the same nucleotide as the corresponding position in the second sequence, then the molecules are identical at that position. The percent identity between the two sequences is a function of the number of identical positions shared by the sequences, taking into account the number of gaps, and the length of each gap, which needs to be introduced for optimal alignment of the two sequences. The comparison of sequences and determination of percent identity between two sequences can be accomplished using a mathematical algorithm. For example, the percent identity between two nucleic acid sequences can be determined using methods such as those described in Computational Molecular Biology, Lesk, A. M., ed., Oxford University Press, New York, 1988; Biocomputing: Informatics and Genome Projects, Smith, D. W., ed., Academic Press, New York, 1993; Sequence Analysis in Molecular Biology, von Heinje, G., Academic Press, 1987; Computer Analysis of Sequence Data, Part I, Griffin, A. M., and Griffin, H. G., eds., Humana Press, New Jersey, 1994; and Sequence Analysis Primer, Gribskov, M. and Devereux, J., eds., M Stockton Press, New York, 1991; each of which is incorporated herein by reference. For example, the percent identity between two nucleic acid sequences can be determined using the algorithm of Meyers and Miller (CABIOS, 1989, 4:11-17), which has been incorporated into the ALIGN program (version 2.0) using a PAM120 weight residue table, a gap length penalty of 12 and a gap penalty of 4. The percent identity between two nucleic acid sequences can, alternatively, be determined using the GAP program in the GCG software package using an NWSgapdna.CMP matrix. Methods commonly employed to determine percent identity between sequences include, but are not limited to those disclosed in Carillo, H., and Lipman, D., SIAM J Applied Math., 48:1073 (1988); incorporated herein by reference. Techniques for determining identity are codified in publicly available computer programs. Exemplary computer software to determine homology between two sequences include, but are not limited to, GCG program package, Devereux, J., et al., Nucleic Acids Research, 12(1), 387 (1984)), BLASTP, BLASTN, and FASTA Altschul, S. F. et al., J. Molec. Biol., 215, 403 (1990)).

### Chemical Modifications

[0137] RNA (e.g., mRNA) vaccines of the present disclosure comprise at least one ribonucleic acid (RNA) polynucleotide having an open reading frame encoding at least one Ebola virus and/or at least one Marburg antigenic polypeptide that comprises at least one chemical modification.

[0138] The terms “chemical modification” and “chemically modified” refer to modification with respect to adenosine (A), guanosine (G), uridine (U), thymidine (T) or cytidine (C) ribonucleosides or deoxyribnucleosides in at least one of their position, pattern, percent or population. Generally, these terms do not refer to the ribonucleotide modifications in naturally occurring 5′-terminal mRNA cap moieties. With respect to a polypeptide, the term “modification” refers to a modification relative to the canonical set 20 amino acids. Polypeptides, as provided herein, are also considered “modified” of they contain amino acid substitutions, insertions or a combination of substitutions and insertions.

[0139] Polynucleotides (e.g., RNA polynucleotides, such as mRNA polynucleotides), in some embodiments, comprise various (more than one) different modifications. In some embodiments, a particular region of a polynucleotide contains one, two or more (optionally different) nucleoside or nucleotide modifications. In some embodiments, a modified RNA polynucleotide (e.g., a modified mRNA polynucleotide), introduced to a cell or organism, exhibits reduced degradation in the cell or organism, respectively, relative to an unmodified polynucleotide. In some embodiments, a modified RNA polynucleotide (e.g., a modified mRNA polynucleotide), introduced into a cell or organism, may exhibit reduced immunogenicity in the cell or organism, respectively (e.g., a reduced innate response).

[0140] Modifications of polynucleotides include, without limitation, those described herein. Polynucleotides (e.g., RNA polynucleotides, such as mRNA polynucleotides) may comprise modifications that are naturally-occurring, non-naturally-occurring or the polynucleotide may comprise a combination of naturally-occurring and non-naturally-occurring modifications. Polynucleotides may include any useful modification, for example, of a sugar, a nucleobase, or an internucleoside linkage (e.g., to a linking phosphate, to a phosphodiester linkage or to the phosphodiester backbone).

[0141] Polynucleotides (e.g., RNA polynucleotides, such as mRNA polynucleotides), in some embodiments, comprise non-natural modified nucleotides that are introduced during synthesis or post-synthesis of the polynucleotides to achieve desired functions or properties. The modifications may be present on an internucleotide linkages, purine or pyrimidine bases, or sugars. The modification may be introduced with chemical synthesis or with a polymerase enzyme at the terminal of a chain or anywhere else in the chain. Any of the regions of a polynucleotide may be chemically modified.

[0142] The present disclosure provides for modified nucleosides and nucleotides of a polynucleotide (e.g., RNA polynucleotides, such as mRNA polynucleotides). A “nucleoside” refers to a compound containing a sugar molecule (e.g., a pentose or ribose) or a derivative thereof in combination with an organic base (e.g., a purine or pyrimidine) or a derivative thereof (also referred to herein as “nucleobase”). A nucleotide” refers to a nucleoside, including a phosphate group. Modified nucleotides may by synthesized by any useful method, such as, for example, chemically, enzymatically, or recombinantly, to include one or more modified or non-natural nucleosides. Polynucleotides may comprise a region or regions of linked nucleosides. Such regions may have variable backbone linkages. The linkages may be standard phosphdioester linkages, in which case the polynucleotides would comprise regions of nucleotides.

[0143] Modified nucleotide base pairing encompasses not only the standard adenosine-thymine, adenosine-uracil, or guanosine-cytosine base pairs, but also base pairs formed between nucleotides and/or modified nucleotides comprising non-standard or modified bases, wherein the arrangement of hydrogen bond donors and hydrogen bond acceptors permits hydrogen bonding between a non-standard base and a standard base or between two complementary non-standard base structures. One example of such non-standard base pairing is the base pairing between the modified nucleotide inosine and adenine, cytosine or uracil. Any combination of base/sugar or linker may be incorporated into polynucleotides of the present disclosure.

[0144] The skilled artisan will appreciate that, except where otherwise noted, polynucleotide sequences set forth in the instant application will recite “T”s in a representative DNA sequence but where the sequence represents RNA, the “T”s would be substituted for “U”s. In some embodiments, modified nucleobases in nucleic acids (e.g., RNA nucleic acids, such as mRNA nucleic acids) comprise 1-methyl-pseudouridine (m1ψ), 1-ethyl-pseudouridine (e1ψ), 5-methoxy-uridine (mo5U), 5-methyl-cytidine (m5C), and/or pseudouridine (ψ). In some embodiments, modified nucleobases in nucleic acids (e.g., RNA nucleic acids, such as mRNA nucleic acids) comprise 5-methoxymethyl uridine, 5-methylthio uridine, 1-methoxymethyl pseudouridine, 5-methyl cytidine, and/or 5-methoxy cytidine. In some embodiments, the polyribonucleotide includes a combination of at least two (e.g., 2, 3, 4 or more) of any of the aforementioned modified nucleobases, including but not limited to chemical modifications.

[0145] In some embodiments, a RNA nucleic acid of the disclosure comprises 1-methyl-pseudouridine (m1ψ) substitutions at one or more or all uridine positions of the nucleic acid.

[0146] In some embodiments, a RNA nucleic acid of the disclosure comprises 1-methyl-pseudouridine (m1ψ) substitutions at one or more or all uridine positions of the nucleic acid and 5-methyl cytidine substitutions at one or more or all cytidine positions of the nucleic acid.

[0147] In some embodiments, a RNA nucleic acid of the disclosure comprises pseudouridine (ψ) substitutions at one or more or all uridine positions of the nucleic acid.

[0148] In some embodiments, a RNA nucleic acid of the disclosure comprises pseudouridine (ψ) substitutions at one or more or all uridine positions of the nucleic acid and 5-methyl cytidine substitutions at one or more or all cytidine positions of the nucleic acid.

[0149] In some embodiments, a RNA nucleic acid of the disclosure comprises uridine at one or more or all uridine positions of the nucleic acid.

[0150] In some embodiments, nucleic acids (e.g., RNA nucleic acids, such as mRNA nucleic acids) are uniformly modified (e.g., fully modified, modified throughout the entire sequence) for a particular modification. For example, a nucleic acid can be uniformly modified with 1-methyl-pseudouridine, meaning that all uridine residues in the mRNA sequence are replaced with 1-methyl-pseudouridine. Similarly, a nucleic acid can be uniformly modified for any type of nucleoside residue present in the sequence by replacement with a modified residue such as those set forth above.

[0151] The nucleic acids of the present disclosure may be partially or fully modified along the entire length of the molecule. For example, one or more or all or a given type of nucleotide (e.g., purine or pyrimidine, or any one or more or all of A, G, U, C) may be uniformly modified in a nucleic acid of the disclosure, or in a predetermined sequence region thereof (e.g., in the mRNA including or excluding the polyA tail). In some embodiments, all nucleotides X in a nucleic acid of the present disclosure (or in a sequence region thereof) are modified nucleotides, wherein X may be any one of nucleotides A, G, U, C, or any one of the combinations A+G, A+U, A+C, G+U, G+C, U+C, A+G+U, A+G+C, G+U+C or A+G+C.

[0152] The nucleic acid may contain from about 1% to about 100% modified nucleotides (either in relation to overall nucleotide content, or in relation to one or more types of nucleotide, i.e., any one or more of A, G, U or C) or any intervening percentage (e.g., from 1% to 20%, from 1% to 25%, from 1% to 50%, from 1% to 60%, from 1% to 70%, from 1% to 80%, from 1% to 90%, from 1% to 95%, from 10% to 20%, from 10% to 25%, from 10% to 50%, from 10% to 60%, from 10% to 70%, from 10% to 80%, from 10% to 90%, from 10% to 95%, from 10% to 100%, from 20% to 25%, from 20% to 50%, from 20% to 60%, from 20% to 70%, from 20% to 80%, from 20% to 90%, from 20% to 95%, from 20% to 100%, from 50% to 60%, from 50% to 70%, from 50% to 80%, from 50% to 90%, from 50% to 95%, from 50% to 100%, from 70% to 80%, from 70% to 90%, from 70% to 95%, from 70% to 100%, from 80% to 90%, from 80% to 95%, from 80% to 100%, from 90% to 95%, from 90% to 100%, and from 95% to 100%). It will be understood that any remaining percentage is accounted for by the presence of unmodified A, G, U, or C.

[0153] The nucleic acids may contain at a minimum 1% and at maximum 100% modified nucleotides, or any intervening percentage, such as at least 5% modified nucleotides, at least 10% modified nucleotides, at least 25% modified nucleotides, at least 50% modified nucleotides, at least 80% modified nucleotides, or at least 90% modified nucleotides. For example, the nucleic acids may contain a modified pyrimidine such as a modified uracil or cytosine. In some embodiments, at least 5%, at least 10%, at least 25%, at least 50%, at least 80%, at least 90% or 100% of the uracil in the nucleic acid is replaced with a modified uracil (e.g., a 5-substituted uracil). The modified uracil can be replaced by a compound having a single unique structure, or can be replaced by a plurality of compounds having different structures (e.g., 2, 3, 4 or more unique structures). In some embodiments, at least 5%, at least 10%, at least 25%, at least 50%, at least 80%, at least 90% or 100% of the cytosine in the nucleic acid is replaced with a modified cytosine (e.g., a 5-substituted cytosine). The modified cytosine can be replaced by a compound having a single unique structure, or can be replaced by a plurality of compounds having different structures (e.g., 2, 3, 4 or more unique structures).

### Flagellin Adjuvants

[0154] Flagellin is an approximately 500 amino acid monomeric protein that polymerizes to form the flagella associated with bacterial motion. Flagellin is expressed by a variety of flagellated bacteria (Salmonella typhimurium for example) as well as non-flagellated bacteria (such as Escherichia coli). Sensing of flagellin by cells of the innate immune system (dendritic cells, macrophages, etc.) is mediated by the Toll-like receptor 5 (TLRS) as well as by Nod-like receptors (NLRs) Ipaf and Naip5. TLRs and NLRs have been identified as playing a role in the activation of innate immune response and adaptive immune response. As such, flagellin provides an adjuvant effect in a vaccine.

[0155] The nucleotide and amino acid sequences encoding known flagellin polypeptides are publicly available in the NCBI GenBank database. The flagellin sequences from S. Typhimurium, H. Pylori, V. Cholera, S. marcesens, S. flexneri, T. Pallidum, L. pneumophila, B. burgdorferei, C. difficile, R. meliloti, A. tumefaciens, R. lupini, B. clarridgeiae, P. Mirabilis, B. subtilus, L. monocytogenes, P. aeruginosa, and E. coli, among others are known.

[0156] A flagellin polypeptide, as used herein, refers to a full length flagellin protein, immunogenic fragments thereof, and peptides having at least 50% sequence identify to a flagellin protein or immunogenic fragments thereof. Exemplary flagellin proteins include flagellin from Salmonella typhi (UniPro Entry number: Q56086), Salmonella typhimurium (A0A0C9DG09), Salmonella enteritidis (A0A0C9BAB7), and Salmonella choleraesuis (Q6V2X8). In some embodiments, the flagellin polypeptide has at least 60%, 70%, 75%, 80%, 90%, 95%, 97%, 98%, or 99% sequence identify to a flagellin protein or immunogenic fragments thereof.

[0157] In some embodiments, the flagellin polypeptide is an immunogenic fragment. An immunogenic fragment is a portion of a flagellin protein that provokes an immune response. In some embodiments, the immune response is a TLRS immune response. An example of an immunogenic fragment is a flagellin protein in which all or a portion of a hinge region has been deleted or replaced with other amino acids. For example, an antigenic polypeptide may be inserted in the hinge region. Hinge regions are the hypervariable regions of a flagellin. Hinge regions of a flagellin are also referred to as “D3 domain or region, “propeller domain or region,” “hypervariable domain or region” and “variable domain or region.” “At least a portion of a hinge region,” as used herein, refers to any part of the hinge region of the flagellin, or the entirety of the hinge region. In other embodiments an immunogenic fragment of flagellin is a 20, 25, 30, 35, or 40 amino acid C-terminal fragment of flagellin.

[0158] The flagellin monomer is formed by domains D0 through D3. D0 and D1, which form the stem, are composed of tandem long alpha helices and are highly conserved among different bacteria. The D1 domain includes several stretches of amino acids that are useful for TLRS activation. The entire D1 domain or one or more of the active regions within the domain are immunogenic fragments of flagellin. Examples of immunogenic regions within the D1 domain include residues 88-114 and residues 411-431 (in Salmonella typhimurium FliC flagellin. Within the 13 amino acids in the 88-100 region, at least 6 substitutions are permitted between Salmonella flagellin and other flagellins that still preserve TLRS activation. Thus, immunogenic fragments of flagellin include flagellin like sequences that activate TLRS and contain a 13 amino acid motif that is 53% or more identical to the Salmonella sequence in 88-100 of FliC (LQRVRELAVQSAN; SEQ ID NO: 183).

[0159] In some embodiments, the RNA (e.g., mRNA) vaccine includes an RNA that encodes a fusion protein of flagellin and one or more antigenic polypeptides. A “fusion protein” as used herein, refers to a linking of two components of the construct. In some embodiments, a carboxy-terminus of the antigenic polypeptide is fused or linked to an amino terminus of the flagellin polypeptide. In other embodiments, an amino-terminus of the antigenic polypeptide is fused or linked to a carboxy-terminus of the flagellin polypeptide. The fusion protein may include, for example, one, two, three, four, five, six or more flagellin polypeptides linked to one, two, three, four, five, six or more antigenic polypeptides. When two or more flagellin polypeptides and/or two or more antigenic polypeptides are linked such a construct may be referred to as a “multimer.”

[0160] Each of the components of a fusion protein may be directly linked to one another or they may be connected through a linker. For instance, the linker may be an amino acid linker. The amino acid linker encoded for by the RNA (e.g., mRNA) vaccine to link the components of the fusion protein may include, for instance, at least one member selected from the group consisting of a lysine residue, a glutamic acid residue, a serine residue and an arginine residue. In some embodiments the linker is 1-30, 1-25, 1-25, 5-10, 5, 15, or 5-20 amino acids in length.

[0161] In other embodiments the RNA (e.g., mRNA) vaccine includes at least two separate RNA polynucleotides, one encoding one or more antigenic polypeptides and the other encoding the flagellin polypeptide. The at least two RNA polynucleotides may be co-formulated in a carrier such as a lipid nanoparticle.

In Vitro Transcription of RNA (e.g., mRNA)

[0162] Ebola virus and/or Marburg virus vaccines of the present disclosure comprise at least one RNA polynucleotide, such as an mRNA (e.g., modified mRNA). mRNA, for example, is transcribed in vitro from template DNA, referred to as an “in vitro transcription template.” In some embodiments, an in vitro transcription template encodes a 5′ untranslated (UTR) region, contains an open reading frame, and encodes a 3′ UTR and a polyA tail. The particular nucleic acid sequence composition and length of an in vitro transcription template will depend on the mRNA encoded by the template.

[0163] A “5′ untranslated region” (UTR) refers to a region of an mRNA that is directly upstream (i.e., 5′) from the start codon (i.e., the first codon of an mRNA transcript translated by a ribosome) that does not encode a polypeptide.

[0164] A “3′ untranslated region” (UTR) refers to a region of an mRNA that is directly downstream (i.e., 3′) from the stop codon (i.e., the codon of an mRNA transcript that signals a termination of translation) that does not encode a polypeptide.

[0165] An “open reading frame” is a continuous stretch of DNA beginning with a start codon (e.g., methionine (ATG)), and ending with a stop codon (e.g., TAA, TAG or TGA) and encodes a polypeptide.

[0166] A “polyA tail” is a region of mRNA that is downstream, e.g., directly downstream (i.e., 3′), from the 3′ UTR that contains multiple, consecutive adenosine monophosphates. A polyA tail may contain 10 to 300 adenosine monophosphates. For example, a polyA tail may contain 10, 20, 30, 40, 50, 60, 70, 80, 90, 100, 110, 120, 130, 140, 150, 160, 170, 180, 190, 200, 210, 220, 230, 240, 250, 260, 270, 280, 290 or 300 adenosine monophosphates. In some embodiments, a polyA tail contains 50 to 250 adenosine monophosphates. In a relevant biological setting (e.g., in cells, in vivo) the poly(A) tail functions to protect mRNA from enzymatic degradation, e.g., in the cytoplasm, and aids in transcription termination, export of the mRNA from the nucleus and translation.

[0167] In some embodiments, a polynucleotide includes 200 to 3,000 nucleotides. For example, a polynucleotide may include 200 to 500, 200 to 1000, 200 to 1500, 200 to 3000, 500 to 1000, 500 to 1500, 500 to 2000, 500 to 3000, 1000 to 1500, 1000 to 2000, 1000 to 3000, 1500 to 3000, or 2000 to 3000 nucleotides).

### Purification

[0168] Purification of the nucleic acids described herein may include, but is not limited to, nucleic acid clean-up, quality assurance and quality control. Clean-up may be performed by methods known in the arts such as, but not limited to, AGENCOURT® beads (Beckman Coulter Genomics, Danvers, Mass.), poly-T beads, LNA™ oligo-T capture probes (EXIQON® Inc, Vedbaek, Denmark) or HPLC based purification methods such as, but not limited to, strong anion exchange HPLC, weak anion exchange HPLC, reverse phase HPLC (RP-HPLC), and hydrophobic interaction HPLC (HIC-HPLC). The term “purified” when used in relation to a nucleic acid such as a “purified nucleic acid” refers to one that is separated from at least one contaminant. A “contaminant” is any substance that makes another unfit, impure or inferior. Thus, a purified nucleic acid (e.g., DNA and RNA) is present in a form or setting different from that in which it is found in nature, or a form or setting different from that which existed prior to subjecting it to a treatment or purification method.

[0169] A quality assurance and/or quality control check may be conducted using methods such as, but not limited to, gel electrophoresis, UV absorbance, or analytical HPLC.

[0170] In some embodiments, the nucleic acids may be sequenced by methods including, but not limited to reverse-transcriptase-PCR.

### Quantification

[0171] In some embodiments, the nucleic acids of the present invention may be quantified in exosomes or when derived from one or more bodily fluid. Bodily fluids include peripheral blood, serum, plasma, ascites, urine, cerebrospinal fluid (CSF), sputum, saliva, bone marrow, synovial fluid, aqueous humor, amniotic fluid, cerumen, breast milk, broncheoalveolar lavage fluid, semen, prostatic fluid, cowper's fluid or pre-ejaculatory fluid, sweat, fecal matter, hair, tears, cyst fluid, pleural and peritoneal fluid, pericardial fluid, lymph, chyme, chyle, bile, interstitial fluid, menses, pus, sebum, vomit, vaginal secretions, mucosal secretion, stool water, pancreatic juice, lavage fluids from sinus cavities, bronchopulmonary aspirates, blastocyl cavity fluid, and umbilical cord blood. Alternatively, exosomes may be retrieved from an organ selected from the group consisting of lung, heart, pancreas, stomach, intestine, bladder, kidney, ovary, testis, skin, colon, breast, prostate, brain, esophagus, liver, and placenta.

[0172] Assays may be performed using construct specific probes, cytometry, qRT-PCR, real-time PCR, PCR, flow cytometry, electrophoresis, mass spectrometry, or combinations thereof while the exosomes may be isolated using immunohistochemical methods such as enzyme linked immunosorbent assay (ELISA) methods. Exosomes may also be isolated by size exclusion chromatography, density gradient centrifugation, differential centrifugation, nanomembrane ultrafiltration, immunoabsorbent capture, affinity purification, microfluidic separation, or combinations thereof.

[0173] These methods afford the investigator the ability to monitor, in real time, the level of nucleic acids remaining or delivered. This is possible because the nucleic acids of the present disclosure, in some embodiments, differ from the endogenous forms due to the structural or chemical modifications.

[0174] In some embodiments, the nucleic acid may be quantified using methods such as, but not limited to, ultraviolet visible spectroscopy (UV/Vis). A non-limiting example of a UV/Vis spectrometer is a NANODROP® spectrometer (ThermoFisher, Waltham, Mass.). The quantified nucleic acid may be analyzed in order to determine if the nucleic acid may be of proper size, check that no degradation of the nucleic acid has occurred. Degradation of the nucleic acid may be checked by methods such as, but not limited to, agarose gel electrophoresis, HPLC based purification methods such as, but not limited to, strong anion exchange HPLC, weak anion exchange HPLC, reverse phase HPLC (RP-HPLC), and hydrophobic interaction HPLC (HIC-HPLC), liquid chromatography-mass spectrometry (LCMS), capillary electrophoresis (CE) and capillary gel electrophoresis (CGE).

### Methods of Treatment

[0175] Provided herein are compositions (e.g., pharmaceutical compositions), methods, kits and reagents for prevention and/or treatment of Ebola virus and/or Marburg virus in humans and other mammals. Ebola virus and/or Marburg virus RNA (e.g., mRNA) vaccines can be used as therapeutic or prophylactic agents. They may be used in medicine to prevent and/or treat infectious disease. In exemplary aspects, the Ebola virus and/or Marburg virus RNA vaccines of the present disclosure are used to provide prophylactic protection from Ebola virus. Prophylactic protection from Ebola virus and/or Marburg virus can be achieved following administration of a Ebola virus and/or Marburg virus RNA (e.g., mRNA) vaccine of the present disclosure. Vaccines can be administered once, twice, three times, four times or more but it is likely sufficient to administer the vaccine once (optionally followed by a single booster). It is possible, although less desirable, to administer the vaccine to an infected individual to achieve a therapeutic response. Dosing may need to be adjusted accordingly.

[0176] A method of eliciting an immune response in a subject against an Ebola virus and/or Marburg virus is provided in aspects of the invention. The method involves administering to the subject an Ebola virus and/or Marburg virus RNA vaccine comprising at least one RNA polynucleotide having an open reading frame encoding at least one Ebola virus and/or Marburg virus antigenic polypeptide or an immunogenic fragment thereof, thereby inducing in the subject an immune response specific to Ebola virus and/or Marburg virus antigenic polypeptide or an immunogenic fragment thereof, wherein anti-antigenic polypeptide antibody titer in the subject is increased following vaccination relative to anti-antigenic polypeptide antibody titer in a subject vaccinated with a prophylactically effective dose of a traditional vaccine against Ebola virus and/or Marburg virus. An “anti-antigenic polypeptide antibody” is a serum antibody the binds specifically to the antigenic polypeptide.

[0177] A prophylactically effective dose is a therapeutically effective dose that prevents infection with the virus at a clinically acceptable level. In some embodiments the therapeutically effective dose is a dose listed in a package insert for the vaccine. A traditional vaccine, as used herein, refers to a vaccine other than the mRNA vaccines of the invention. For instance, a traditional vaccine includes but is not limited to live microorganism vaccines, killed microorganism vaccines, subunit vaccines, protein antigen vaccines, DNA vaccines, etc. In exemplary embodiments, a traditional vaccine is a vaccine that has achieved regulatory approval and/or is registered by a national drug regulatory body, for example the Food and Drug Administration (FDA) in the United States or the European Medicines Agency (EMA).

[0178] In some embodiments the anti-antigenic polypeptide antibody titer in the subject is increased 1 log to 10 log following vaccination relative to anti-antigenic polypeptide antibody titer in a subject vaccinated with a prophylactically effective dose of a traditional vaccine against Ebola virus and/or Marburg virus.

[0179] In some embodiments the anti-antigenic polypeptide antibody titer in the subject is increased 1 log following vaccination relative to anti-antigenic polypeptide antibody titer in a subject vaccinated with a prophylactically effective dose of a traditional vaccine against Ebola virus and/or Marburg virus.

[0180] In some embodiments the anti-antigenic polypeptide antibody titer in the subject is increased 2 log following vaccination relative to anti-antigenic polypeptide antibody titer in a subject vaccinated with a prophylactically effective dose of a traditional vaccine against Ebola virus and/or Marburg virus.

[0181] In some embodiments the anti-antigenic polypeptide antibody titer in the subject is increased 3 log following vaccination relative to anti-antigenic polypeptide antibody titer in a subject vaccinated with a prophylactically effective dose of a traditional vaccine against Ebola virus and/or Marburg virus.

[0182] In some embodiments the anti-antigenic polypeptide antibody titer in the subject is increased 5 log following vaccination relative to anti-antigenic polypeptide antibody titer in a subject vaccinated with a prophylactically effective dose of a traditional vaccine against Ebola virus and/or Marburg virus.

[0183] In some embodiments the anti-antigenic polypeptide antibody titer in the subject is increased 10 log following vaccination relative to anti-antigenic polypeptide antibody titer in a subject vaccinated with a prophylactically effective dose of a traditional vaccine against Ebola virus and/or Marburg virus.

[0184] A method of eliciting an immune response in a subject against an Ebola virus and/or s Marburg virus is provided in other aspects of the invention. The method involves administering to the subject an Ebola virus and/or a Marburg virus RNA vaccine comprising at least one RNA polynucleotide having an open reading frame encoding at least one Ebola virus and/or Marburg virus antigenic polypeptide or an immunogenic fragment thereof, thereby inducing in the subject an immune response specific to Ebola virus and/or Marburg virus antigenic polypeptide or an immunogenic fragment thereof, wherein the immune response in the subject is equivalent to an immune response in a subject vaccinated with a traditional vaccine against the Ebola virus and/or Marburg virus at 2 times to 100 times the dosage level relative to the RNA vaccine.

[0185] In some embodiments the immune response in the subject is equivalent to an immune response in a subject vaccinated with a traditional vaccine at twice the dosage level relative to the Ebola virus and/or Marburg virus RNA vaccine.

[0186] In some embodiments the immune response in the subject is equivalent to an immune response in a subject vaccinated with a traditional vaccine at three times the dosage level relative to the Ebola virus and/or Marburg virus RNA vaccine.

[0187] In some embodiments the immune response in the subject is equivalent to an immune response in a subject vaccinated with a traditional vaccine at 4 times the dosage level relative to the Ebola virus and/or Marburg virus RNA vaccine.

[0188] In some embodiments the immune response in the subject is equivalent to an immune response in a subject vaccinated with a traditional vaccine at 5 times the dosage level relative to the Ebola virus and/or Marburg virus RNA vaccine.

[0189] In some embodiments the immune response in the subject is equivalent to an immune response in a subject vaccinated with a traditional vaccine at 10 times the dosage level relative to the Ebola virus and/or Marburg virus RNA vaccine.

[0190] In some embodiments the immune response in the subject is equivalent to an immune response in a subject vaccinated with a traditional vaccine at 50 times the dosage level relative to the Ebola virus and/or Marburg virus RNA vaccine.

[0191] In some embodiments the immune response in the subject is equivalent to an immune response in a subject vaccinated with a traditional vaccine at 100 times the dosage level relative to the Ebola virus and/or Marburg virus RNA vaccine.

[0192] In some embodiments the immune response in the subject is equivalent to an immune response in a subject vaccinated with a traditional vaccine at 10 times to 1000 times the dosage level relative to the Ebola virus and/or Marburg virus RNA vaccine.

[0193] In some embodiments the immune response in the subject is equivalent to an immune response in a subject vaccinated with a traditional vaccine at 100 times to 1000 times the dosage level relative to the Ebola virus and/or Marburg virus RNA vaccine.

[0194] In other embodiments the immune response is assessed by determining anti-antigenic polypeptide antibody titer in the subject.

[0195] In other aspects the invention is a method of eliciting an immune response in a subject against a Ebola virus and/or Marburg virus by administering to the subject an Ebola virus and/or a Marburg virus RNA vaccine comprising at least one RNA polynucleotide having an open reading frame encoding at least one Ebola virus and/or Marburg virus antigenic polypeptide or an immunogenic fragment thereof, thereby inducing in the subject an immune response specific to Ebola virus and/or Marburg virus antigenic polypeptide or an immunogenic fragment thereof, wherein the immune response in the subject is induced 2 days to 10 weeks earlier relative to an immune response induced in a subject vaccinated with a prophylactically effective dose of a traditional vaccine against the Ebola virus and/or the Marburg virus. In some embodiments the immune response in the subject is induced in a subject vaccinated with a prophylactically effective dose of a traditional vaccine at 2 times to 100 times the dosage level relative to the RNA vaccine.

[0196] In some embodiments the immune response in the subject is induced 2 days earlier relative to an immune response induced in a subject vaccinated with a prophylactically effective dose of a traditional vaccine.

[0197] In some embodiments the immune response in the subject is induced 3 days earlier relative to an immune response induced in a subject vaccinated a prophylactically effective dose of a traditional vaccine.

[0198] In some embodiments the immune response in the subject is induced 1 week earlier relative to an immune response induced in a subject vaccinated with a prophylactically effective dose of a traditional vaccine.

[0199] In some embodiments the immune response in the subject is induced 2 weeks earlier relative to an immune response induced in a subject vaccinated with a prophylactically effective dose of a traditional vaccine.

[0200] In some embodiments the immune response in the subject is induced 3 weeks earlier relative to an immune response induced in a subject vaccinated with a prophylactically effective dose of a traditional vaccine.

[0201] In some embodiments the immune response in the subject is induced 5 weeks earlier relative to an immune response induced in a subject vaccinated with a prophylactically effective dose of a traditional vaccine.

[0202] In some embodiments the immune response in the subject is induced 10 weeks earlier relative to an immune response induced in a subject vaccinated with a prophylactically effective dose of a traditional vaccine.

[0203] A method of eliciting an immune response in a subject against an Ebola virus and/or a Marburg virus by administering to the subject an Ebola virus and/or Marburg virus RNA vaccine having an open reading frame encoding a first antigenic polypeptide, wherein the RNA polynucleotide does not include a stabilization element, and wherein an adjuvant is not coformulated or co-administered with the vaccine.

Broad Spectrum RNA (e.g., mRNA) Vaccines

[0204] There may be situations where persons are at risk for infection with more than one strain of Ebola virus and/or Marburg virus. RNA (mRNA) therapeutic vaccines are particularly amenable to combination vaccination approaches due to a number of factors including, but not limited to, speed of manufacture, ability to rapidly tailor vaccines to accommodate perceived geographical threat, and the like. Moreover, because the vaccines utilize the human body to produce the antigenic protein, the vaccines are amenable to the production of larger, more complex antigenic proteins, allowing for proper folding, surface expression, antigen presentation, etc. in the human subject. To protect against more than one strain of Ebola virus and/or Marburg virus, a combination vaccine can be administered that includes RNA encoding at least one antigenic polypeptide protein (or antigenic portion thereof) of a first Ebola virus and/or Marburg virus antigen and further includes RNA encoding at least one antigenic polypeptide protein (or antigenic portion thereof) of a second Ebola virus and/or Marburg virus antigen. Additionally, or alternatively an epitope may be selected that has cross-strain homology and thus produces an immune response against more than one strain. RNAs (mRNAs) can be co-formulated, for example, in a single lipid nanoparticle (LNP) or can be formulated in separate LNPs destined for co-administration.

### Therapeutic and Prophylactic Compositions

[0205] Provided herein are compositions (e.g., pharmaceutical compositions), methods, kits and reagents for prevention, treatment or diagnosis of Ebola virus and/or Marburg virus in humans and other mammals, for example. Ebola virus and/or Marburg virus RNA (e.g., mRNA) vaccines can be used as therapeutic or prophylactic agents. They may be used in medicine to prevent and/or treat infectious disease. In some embodiments, the Ebola virus and/or Marburg virus vaccines of the invention can be envisioned for use in the priming of immune effector cells, for example, to activate peripheral blood mononuclear cells (PBMCs) ex vivo, which are then infused (re-infused) into a subject.

[0206] In exemplary embodiments, an Ebola virus and/or Marburg virus vaccine containing RNA polynucleotides as described herein can be administered to a subject (e.g., a mammalian subject, such as a human subject), and the RNA polynucleotides are translated in vivo to produce an antigenic polypeptide.

[0207] The Ebola virus and/or Marburg virus RNA vaccines may be induced for translation of a polypeptide (e.g., antigen or immunogen) in a cell, tissue or organism. In exemplary embodiments, such translation occurs in vivo, although there can be envisioned embodiments where such translation occurs ex vivo, in culture or in vitro. In exemplary embodiments, the cell, tissue or organism is contacted with an effective amount of a composition containing an Ebola virus and/or Marburg virus RNA vaccine that contains a polynucleotide that has at least one a translatable region encoding an antigenic polypeptide.

[0208] An “effective amount” of an Ebola virus and/or Marburg virus RNA vaccine is provided based, at least in part, on the target tissue, target cell type, means of administration, physical characteristics of the polynucleotide (e.g., size, and extent of modified nucleosides) and other components of the Ebola virus and/or Marburg virus RNA vaccine, and other determinants. In general, an effective amount of the Ebola virus and/or Marburg virus RNA vaccine composition provides an induced or boosted immune response as a function of antigen production in the cell, preferably more efficient than a composition containing a corresponding unmodified polynucleotide encoding the same antigen or a peptide antigen. Increased antigen production may be demonstrated by increased cell transfection (the percentage of cells transfected with the RNA vaccine), increased protein translation from the polynucleotide, decreased nucleic acid degradation (as demonstrated, for example, by increased duration of protein translation from a modified polynucleotide), or altered antigen specific immune response of the host cell.

[0209] In some embodiments, RNA vaccines (including polynucleotides their encoded polypeptides) in accordance with the present disclosure may be used for treatment of Ebola virus and/or Marburg virus.

[0210] Ebola virus and/or Marburg virus RNA vaccines may be administered prophylactically or therapeutically as part of an active immunization scheme to healthy individuals or early in infection during the incubation phase or during active infection after onset of symptoms. In some embodiments, the amount of RNA vaccines of the present disclosure provided to a cell, a tissue or a subject may be an amount effective for immune prophylaxis.

[0211] Ebola virus and/or Marburg virus RNA vaccines may be administrated with other prophylactic or therapeutic compounds. As a non-limiting example, a prophylactic or therapeutic compound may be an adjuvant or a booster. As used herein, when referring to a prophylactic composition, such as a vaccine, the term “booster” refers to an extra administration of the prophylactic (vaccine) composition. A booster (or booster vaccine) may be given after an earlier administration of the prophylactic composition. The time of administration between the initial administration of the prophylactic composition and the booster may be, but is not limited to, 1 minute, 2 minutes, 3 minutes, 4 minutes, 5 minutes, 6 minutes, 7 minutes, 8 minutes, 9 minutes, 10 minutes, 15 minutes, 20 minutes 35 minutes, 40 minutes, 45 minutes, 50 minutes, 55 minutes, 1 hour, 2 hours, 3 hours, 4 hours, 5 hours, 6 hours, 7 hours, 8 hours, 9 hours, 10 hours, 11 hours, 12 hours, 13 hours, 14 hours, 15 hours, 16 hours, 17 hours, 18 hours, 19 hours, 20 hours, 21 hours, 22 hours, 23 hours, 1 day, 36 hours, 2 days, 3 days, 4 days, 5 days, 6 days, 1 week, 10 days, 2 weeks, 3 weeks, 1 month, 2 months, 3 months, 4 months, 5 months, 6 months, 7 months, 8 months, 9 months, 10 months, 11 months, 1 year, 18 months, 2 years, 3 years, 4 years, 5 years, 6 years, 7 years, 8 years, 9 years, 10 years, 11 years, 12 years, 13 years, 14 years, 15 years, 16 years, 17 years, 18 years, 19 years, 20 years, 25 years, 30 years, 35 years, 40 years, 45 years, 50 years, 55 years, 60 years, 65 years, 70 years, 75 years, 80 years, 85 years, 90 years, 95 years or more than 99 years. In exemplary embodiments, the time of administration between the initial administration of the prophylactic composition and the booster may be, but is not limited to, 1 week, 2 weeks, 3 weeks, 1 month, 2 months, 3 months, 6 months or 1 year.

[0212] In some embodiments, Ebola virus and/or Marburg virus RNA vaccines may be administered intramuscularly or intradermally, similarly to the administration of inactivated vaccines known in the art.

[0213] Ebola virus and/or Marburg virus RNA vaccines may be utilized in various settings depending on the prevalence of the infection or the degree or level of unmet medical need. As a non-limiting example, the RNA vaccines may be utilized to treat and/or prevent a variety of infectious disease. RNA vaccines have superior properties in that they produce much larger antibody titers and produce responses early than commercially available anti-virals.

[0214] Provided herein are pharmaceutical compositions including Ebola virus and/or Marburg virus RNA vaccines and RNA vaccine compositions and/or complexes optionally in combination with one or more pharmaceutically acceptable excipients.

[0215] Ebola virus and/or Marburg virus RNA vaccines may be formulated or administered alone or in conjunction with one or more other components. In some embodiments, Ebola virus and/or Marburg virus RNA vaccines do not include an adjuvant (they are adjuvant free).

[0216] Ebola virus and/or Marburg virus RNA vaccines may be formulated or administered in combination with one or more pharmaceutically-acceptable excipients. In some embodiments, vaccine compositions comprise at least one additional active substances, such as, for example, a therapeutically-active substance, a prophylactically-active substance, or a combination of both. Vaccine compositions may be sterile, pyrogen-free or both sterile and pyrogen-free. General considerations in the formulation and/or manufacture of pharmaceutical agents, such as vaccine compositions, may be found, for example, in Remington: The Science and Practice of Pharmacy 21st ed., Lippincott Williams & Wilkins, 2005 (incorporated herein by reference in its entirety).

[0217] In some embodiments, Ebola virus and/or Marburg virus RNA vaccines are administered to humans, human patients or subjects. For the purposes of the present disclosure, the phrase “active ingredient” generally refers to the RNA vaccines or the polynucleotides contained therein, for example, RNA polynucleotides (e.g., mRNA polynucleotides) encoding antigenic polypeptides.

[0218] Formulations of the vaccine compositions described herein may be prepared by any method known or hereafter developed in the art of pharmacology. In general, such preparatory methods include the step of bringing the active ingredient (e.g., mRNA polynucleotide) into association with an excipient and/or one or more other accessory ingredients, and then, if necessary and/or desirable, dividing, shaping and/or packaging the product into a desired single- or multi-dose unit.

[0219] Relative amounts of the active ingredient, the pharmaceutically acceptable excipient, and/or any additional ingredients in a pharmaceutical composition in accordance with the disclosure will vary, depending upon the identity, size, and/or condition of the subject treated and further depending upon the route by which the composition is to be administered. By way of example, the composition may comprise between 0.1% and 100%, e.g., between 0.5 and 50%, between 1-30%, between 5-80%, at least 80% (w/w) active ingredient.

[0220] Ebola virus and/or Marburg virus RNA vaccines can be formulated using one or more excipients to: (1) increase stability; (2) increase cell transfection; (3) permit the sustained or delayed release (e.g., from a depot formulation); (4) alter the biodistribution (e.g., target to specific tissues or cell types); (5) increase the translation of encoded protein in vivo; and/or (6) alter the release profile of encoded protein (antigen) in vivo. In addition to traditional excipients such as any and all solvents, dispersion media, diluents, or other liquid vehicles, dispersion or suspension aids, surface active agents, isotonic agents, thickening or emulsifying agents, preservatives, excipients can include, without limitation, lipidoids, liposomes, lipid nanoparticles, polymers, lipoplexes, core-shell nanoparticles, peptides, proteins, cells transfected with Ebola virus and/or Marburg virus RNA vaccines (e.g., for transplantation into a subject), hyaluronidase, nanoparticle mimics and combinations thereof.

### Stabilizing Elements

[0221] Naturally-occurring eukaryotic mRNA molecules have been found to contain stabilizing elements, including, but not limited to untranslated regions (UTR) at their 5′-end (5′UTR) and/or at their 3′-end (3′UTR), in addition to other structural features, such as a 5′-cap structure or a 3′-poly(A) tail. Both the 5′UTR and the 3′UTR are typically transcribed from the genomic DNA and are elements of the premature mRNA. Characteristic structural features of mature mRNA, such as the 5′-cap and the 3′-poly(A) tail are usually added to the transcribed (premature) mRNA during mRNA processing. The 3′-poly(A) tail is typically a stretch of adenine nucleotides added to the 3′-end of the transcribed mRNA. It can comprise up to about 400 adenine nucleotides. In some embodiments the length of the 3′-poly(A) tail may be an essential element with respect to the stability of the individual mRNA.

[0222] In some embodiments the RNA vaccine may include one or more stabilizing elements. Stabilizing elements may include for instance a histone stem-loop. A stem-loop binding protein (SLBP), a 32 kDa protein has been identified. It is associated with the histone stem-loop at the 3′-end of the histone messages in both the nucleus and the cytoplasm. Its expression level is regulated by the cell cycle; it is peaks during the S-phase, when histone mRNA levels are also elevated. The protein has been shown to be essential for efficient 3′-end processing of histone pre-mRNA by the U7 snRNP. SLBP continues to be associated with the stem-loop after processing, and then stimulates the translation of mature histone mRNAs into histone proteins in the cytoplasm. The RNA binding domain of SLBP is conserved through metazoa and protozoa; its binding to the histone stem-loop depends on the structure of the loop. The minimum binding site includes at least three nucleotides 5′ and two nucleotides 3′ relative to the stem-loop.

[0223] In some embodiments, the RNA vaccines include a coding region, at least one histone stem-loop, and optionally, a poly(A) sequence or polyadenylation signal. The poly(A) sequence or polyadenylation signal generally should enhance the expression level of the encoded protein. The encoded protein, in some embodiments, is not a histone protein, a reporter protein (e.g. Luciferase, GFP, EGFP, β-Galactosidase, EGFP), or a marker or selection protein (e.g. alpha-Globin, Galactokinase and Xanthine:guanine phosphoribosyl transferase (GPT)).

[0224] In some embodiments, the combination of a poly(A) sequence or polyadenylation signal and at least one histone stem-loop, even though both represent alternative mechanisms in nature, acts synergistically to increase the protein expression beyond the level observed with either of the individual elements. It has been found that the synergistic effect of the combination of poly(A) and at least one histone stem-loop does not depend on the order of the elements or the length of the poly(A) sequence.

[0225] In some embodiments, the RNA vaccine does not comprise a histone downstream element (HDE). “Histone downstream element” (HDE) includes a purine-rich polynucleotide stretch of approximately 15 to 20 nucleotides 3′ of naturally occurring stem-loops, representing the binding site for the U7 snRNA, which is involved in processing of histone pre-mRNA into mature histone mRNA. Ideally, the inventive nucleic acid does not include an intron.

[0226] In some embodiments, the RNA vaccine may or may not contain a enhancer and/or promoter sequence, which may be modified or unmodified or which may be activated or inactivated. In some embodiments, the histone stem-loop is generally derived from histone genes, and includes an intramolecular base pairing of two neighbored partially or entirely reverse complementary sequences separated by a spacer, consisting of a short sequence, which forms the loop of the structure. The unpaired loop region is typically unable to base pair with either of the stem loop elements. It occurs more often in RNA, as is a key component of many RNA secondary structures, but may be present in single-stranded DNA as well. Stability of the stem-loop structure generally depends on the length, number of mismatches or bulges, and base composition of the paired region. In some embodiments, wobble base pairing (non-Watson-Crick base pairing) may result. In some embodiments, the at least one histone stem-loop sequence comprises a length of 15 to 45 nucleotides.

[0227] In other embodiments the RNA vaccine may have one or more AU-rich sequences removed. These sequences, sometimes referred to as AURES are destabilizing sequences found in the 3′UTR. The AURES may be removed from the RNA vaccines. Alternatively the AURES may remain in the RNA vaccine.

### Signal Peptides

[0228] In some embodiments, an EBOV or MARV vaccine comprises a RNA having an ORF that encodes a signal peptide fused to the EBOV or MARV antigen. Signal peptides, comprising the N-terminal 15-60 amino acids of proteins, are typically needed for the translocation across the membrane on the secretory pathway and, thus, universally control the entry of most proteins both in eukaryotes and prokaryotes to the secretory pathway. In eukaryotes, the signal peptide of a nascent precursor protein (pre-protein) directs the ribosome to the rough endoplasmic reticulum (ER) membrane and initiates the transport of the growing peptide chain across it for processing. ER processing produces mature proteins, wherein the signal peptide is cleaved from precursor proteins, typically by a ER-resident signal peptidase of the host cell, or they remain uncleaved and function as a membrane anchor. A signal peptide may also facilitate the targeting of the protein to the cell membrane.

[0229] A signal peptide may have a length of 15-60 amino acids. For example, a signal peptide may have a length of 15, 16, 17, 18, 19, 20, 21, 22, 23, 24, 25, 26, 27, 28, 29, 30, 31, 32, 33, 34, 35, 36, 37, 38, 39, 40, 41, 42, 43, 44, 45, 46, 47, 48, 49, 50, 51, 52, 53, 54, 55, 56, 57, 58, 59, or 60 amino acids. In some embodiments, a signal peptide has a length of 20-60, 25-60, 30-60, 35-60, 40-60, 45-60, 50-60, 55-60, 15-55, 20-55, 25-55, 30-55, 35-55, 40-55, 45-55, 50-55, 15-50, 20-50, 25-50, 30-50, 35-50, 40-50, 45-50, 15-45, 20-45, 25-45, 30-45, 35-45, 40-45, 15-40, 20-40, 25-40, 30-40, 35-40, 15-35, 20-35, 25-35, 30-35, 15-30, 20-30, 25-30, 15-25, 20-25, or 15-20 amino acids.

[0230] Signal peptides from heterologous genes (which regulate expression of genes other than EBOV or MARV antigens in nature) are known in the art and can be tested for desired properties and then incorporated into a nucleic acid of the disclosure. In some embodiments, the signal peptide is selected from: a HuIgGk signal peptide (METPAQLLFLLLLWLPDTTG; SEQ ID NO: 178); IgE heavy chain epsilon-1 signal peptide (MDWTWILFLVAAATRVHS; SEQ ID NO: 179); Japanese encephalitis PRM signal sequence (MLGSNSGQRVVFTILLLLVAPAYS; SEQ ID NO: 180), VSVg protein signal sequence (MKCLLYLAFLFIGVNCA; SEQ ID NO: 181) and Japanese encephalitis JEV signal sequence (MWLVSLAIVTACAGA; SEQ ID NO: 182).

[0231] In some embodiments, the signal peptide is fused to the N-terminus of at least one antigenic polypeptide. In some embodiments, a signal peptide is fused to the C-terminus of at least one antigenic polypeptide.

### Fusion Proteins

[0232] In some embodiments, an EBOV or MARV RNA vaccine of the present disclosure includes an RNA encoding an antigenic fusion protein. Thus, the encoded antigen or antigens may include two or more proteins (e.g., protein and/or protein fragment) joined together. Alternatively, the protein to which a protein antigen is fused does not promote a strong immune response to itself, but rather to the EBOV or MARV antigen. Antigenic fusion proteins, in some embodiments, retain the functional property from each original protein.

### Scaffold Moieties

[0233] The RNA (e.g., mRNA) vaccines as provided herein, in some embodiments, encode fusion proteins which comprise EBOV or MARV antigens linked to scaffold moieties. In some embodiments, such scaffold moieties impart desired properties to an antigen encoded by a nucleic acid of the disclosure. For example scaffold proteins may improve the immunogenicity of an antigen, e.g., by altering the structure of the antigen, altering the uptake and processing of the antigen, and/or causing the antigen to bind to a binding partner.

[0234] In some embodiments, the scaffold moiety is protein that can self-assemble into protein nanoparticles that are highly symmetric, stable, and structurally organized, with diameters of 10-150 nm, a highly suitable size range for optimal interactions with various cells of the immune system. In one embodiment, viral proteins or virus-like particles can be used to form stable nanoparticle structures. Examples of such viral proteins are known in the art. For example, in some embodiments, the scaffold moiety is a hepatitis B surface antigen (HBsAg). HBsAg forms spherical particles with an average diameter of ˜22 nm and which lacked nucleic acid and hence are non-infectious (Lopez-Sagaseta, J. et al. Computational and Structural Biotechnology Journal 14 (2016) 58-68). In some embodiments, the scaffold moiety is a hepatitis B core antigen (HBcAg) self-assembles into particles of 24-31 nm diameter, which resembled the viral cores obtained from HBV-infected human liver. HBcAg produced in self-assembles into two classes of differently sized nanoparticles of 300 Å and 360 A diameter, corresponding to 180 or 240 protomers. In some embodiments an EBOV or MARV antigen is fused to HBsAG or HBcAG to facilitate self-assembly of nanoparticles displaying the EBOV or MARV antigen.

[0235] In another embodiment, bacterial protein platforms may be used. Non-limiting examples of these self-assembling proteins include ferritin, lumazine and encapsulin.

[0236] Ferritin is a protein whose main function is intracellular iron storage. Ferritin is made of 24 subunits, each composed of a four-alpha-helix bundle, that self-assemble in a quaternary structure with octahedral symmetry (Cho K. J. et al. J Mol Biol. 2009; 390:83-98). Several high-resolution structures of ferritin have been determined, confirming that Helicobacter pylori ferritin is made of 24 identical protomers, whereas in animals, there are ferritin light and heavy chains that can assemble alone or combine with different ratios into particles of 24 subunits (Granier T. et al. J Biol Inorg Chem. 2003; 8:105-111; Lawson D. M. et al. Nature. 1991; 349:541-544). Ferritin self-assembles into nanoparticles with robust thermal and chemical stability. Thus, the ferritin nanoparticle is well-suited to carry and expose antigens.

[0237] Lumazine synthase (LS) is also well-suited as a nanoparticle platform for antigen display. LS, which is responsible for the penultimate catalytic step in the biosynthesis of riboflavin, is an enzyme present in a broad variety of organisms, including archaea, bacteria, fungi, plants, and eubacteria (Weber S. E. Flavins and Flavoproteins. Methods and Protocols, Series: Methods in Molecular Biology. 2014). The LS monomer is 150 amino acids long, and consists of beta-sheets along with tandem alpha-helices flanking its sides. A number of different quaternary structures have been reported for LS, illustrating its morphological versatility: from homopentamers up to symmetrical assemblies of 12 pentamers forming capsids of 150 Å diameter. Even LS cages of more than 100 subunits have been described (Zhang X. et al. J Mol Biol. 2006; 362:753-770).

[0238] Encapsulin, a novel protein cage nanoparticle isolated from thermophile Thermotoga maritima, may also be used as a platform to present antigens on the surface of self-assembling nanoparticles. Encapsulin is assembled from 60 copies of identical 31 kDa monomers having a thin and icosahedral T=1 symmetric cage structure with interior and exterior diameters of 20 and 24 nm, respectively (Sutter M. et al. Nat Struct Mol Biol. 2008, 15: 939-947). Although the exact function of encapsulin in T. maritima is not clearly understood yet, its crystal structure has been recently solved and its function was postulated as a cellular compartment that encapsulates proteins such as DyP (Dye decolorizing peroxidase) and Flp (Ferritin like protein), which are involved in oxidative stress responses (Rahmanpour R. et al. FEBS J. 2013, 280: 2097-2104).

### Linkers and Cleavable Peptides

[0239] In some embodiments, the mRNAs of the disclosure encode more than one polypeptide, referred to herein as fusion proteins. In some embodiments, the mRNA further encodes a linker located between at least one or each domain of the fusion protein. The linker can be, for example, a cleavable linker or protease-sensitive linker. In some embodiments, the linker is selected from the group consisting of F2A linker, P2A linker, T2A linker, E2A linker, and combinations thereof. This family of self-cleaving peptide linkers, referred to as 2A peptides, has been described in the art (see for example, Kim, J. H. et al. (2011) PLoS ONE 6:e18556). In some embodiments, the linker is an F2A linker. In some embodiments, the linker is a GGGS linker. In some embodiments, the fusion protein contains three domains with intervening linkers, having the structure: domain-linker-domain-linker-domain.

[0240] Cleavable linkers known in the art may be used in connection with the disclosure. Exemplary such linkers include: F2A linkers, T2A linkers, P2A linkers, E2A linkers (See, e.g., WO2017127750). The skilled artisan will appreciate that other art-recognized linkers may be suitable for use in the constructs of the disclosure (e.g., encoded by the nucleic acids of the disclosure). The skilled artisan will likewise appreciate that other polycistronic constructs (mRNA encoding more than one antigen/polypeptide separately within the same molecule) may be suitable for use as provided herein.

### Sequence Optimization

[0241] In one embodiment, an ORF encoding an antigen of the disclosure is codon optimized. Codon optimization methods are known in the art. For example, an ORF of any one or more of the sequences provided herein may be codon optimized. Codon optimization, in some embodiments, may be used to match codon frequencies in target and host organisms to ensure proper folding; bias GC content to increase mRNA stability or reduce secondary structures; minimize tandem repeat codons or base runs that may impair gene construction or expression; customize transcriptional and translational control regions; insert or remove protein trafficking sequences; remove/add post translation modification sites in encoded protein (e.g., glycosylation sites); add, remove or shuffle protein domains; insert or delete restriction sites; modify ribosome binding sites and mRNA degradation sites; adjust translational rates to allow the various domains of the protein to fold properly; or reduce or eliminate problem secondary structures within the polynucleotide. Codon optimization tools, algorithms and services are known in the art—non-limiting examples include services from GeneArt (Life Technologies), DNA2.0 (Menlo Park Calif.) and/or proprietary methods. In some embodiments, the open reading frame (ORF) sequence is optimized using optimization algorithms.

[0242] In some embodiments, a codon optimized sequence shares less than 95% sequence identity to a naturally-occurring or wild-type sequence ORF (e.g., a naturally-occurring or wild-type mRNA sequence encoding an EBOV or MARV antigen). In some embodiments, a codon optimized sequence shares less than 90% sequence identity to a naturally-occurring or wild-type sequence (e.g., a naturally-occurring or wild-type mRNA sequence encoding n EBOV or MARV antigen). In some embodiments, a codon optimized sequence shares less than 85% sequence identity to a naturally-occurring or wild-type sequence (e.g., a naturally-occurring or wild-type mRNA sequence encoding an EBOV or MARV antigen). In some embodiments, a codon optimized sequence shares less than 80% sequence identity to a naturally-occurring or wild-type sequence (e.g., a naturally-occurring or wild-type mRNA sequence encoding an EBOV or MARV antigen). In some embodiments, a codon optimized sequence shares less than 75% sequence identity to a naturally-occurring or wild-type sequence (e.g., a naturally-occurring or wild-type mRNA sequence encoding an EBOV or MARV antigen).

[0243] In some embodiments, a codon optimized sequence shares between 65% and 85% (e.g., between about 67% and about 85% or between about 67% and about 80%) sequence identity to a naturally-occurring or wild-type sequence (e.g., a naturally-occurring or wild-type mRNA sequence encoding anEBOV or MARV antigen). In some embodiments, a codon optimized sequence shares between 65% and 75% or about 80% sequence identity to a naturally-occurring or wild-type sequence (e.g., a naturally-occurring or wild-type mRNA sequence encoding an EBOV or MARV antigen).

[0244] In some embodiments, a codon-optimized sequence encodes an antigen that is as immunogenic as, or more immunogenic than (e.g., at least 10%, at least 20%, at least 30%, at least 40%, at least 50%, at least 100%, or at least 200% more), than an EBOV or MARV antigen encoded by a non-codon-optimized)sequence.

[0245] When transfected into mammalian cells, the modified mRNAs have a stability of between 12-18 hours, or greater than 18 hours, e.g., 24, 36, 48, 60, 72, or greater than 72 hours.

[0246] In some embodiments, a codon optimized RNA may be one in which the levels of G/C are enhanced. The G/C-content of nucleic acid molecules (e.g., mRNA) may influence the stability of the RNA. RNA having an increased amount of guanine (G) and/or cytosine (C) residues may be functionally more stable than RNA containing a large amount of adenine (A) and thymine (T) or uracil (U) nucleotides. As an example, WO02/098443 discloses a pharmaceutical composition containing an mRNA stabilized by sequence modifications in the translated region. Due to the degeneracy of the genetic code, the modifications work by substituting existing codons for those that promote greater RNA stability without changing the resulting amino acid. The approach is limited to coding regions of the RNA.

### Chemically Unmodified Nucleotides

[0247] In some embodiments, at least one RNA (e.g., mRNA) of an EBOV or MARV vaccines of the present disclosure is not chemically modified and comprises the standard ribonucleotides consisting of adenosine, guanosine, cytosine and uridine. In some embodiments, nucleotides and nucleosides of the present disclosure comprise standard nucleoside residues such as those present in transcribed RNA (e.g. A, G, C, or U). In some embodiments, nucleotides and nucleosides of the present disclosure comprise standard deoxyribonucleosides such as those present in DNA (e.g. dA, dG, dC, or dT).

### Nanoparticle Formulations

[0248] In some embodiments, Ebola virus and/or Marburg virus RNA (e.g., mRNA) vaccines are formulated in a nanoparticle. In some embodiments, Ebola virus and/or Marburg virus RNA vaccines are formulated in a lipid nanoparticle.

[0249] Vaccines of the present disclosure are typically formulated in lipid nanoparticle. In some embodiments, the lipid nanoparticle comprises at least one ionizable cationic lipid, at least one non-cationic lipid, at least one sterol, and/or at least one polyethylene glycol (PEG)-modified lipid.

[0250] In some embodiments, the lipid nanoparticle comprises a molar ratio of 20-60% ionizable cationic lipid. For example, the lipid nanoparticle may comprise a molar ratio of 20-50%, 20-40%, 20-30%, 30-60%, 30-50%, 30-40%, 40-60%, 40-50%, or 50-60% ionizable cationic lipid. In some embodiments, the lipid nanoparticle comprises a molar ratio of 20%, 30%, 40%, 50, or 60% ionizable cationic lipid.

[0251] In some embodiments, the lipid nanoparticle comprises a molar ratio of 5-25% non-cationic lipid. For example, the lipid nanoparticle may comprise a molar ratio of 5-20%, 5-15%, 5-10%, 10-25%, 10-20%, 10-25%, 15-25%, 15-20%, or 20-25% non-cationic lipid. In some embodiments, the lipid nanoparticle comprises a molar ratio of 5%, 10%, 15%, 20%, or 25% non-cationic lipid.

[0252] In some embodiments, the lipid nanoparticle comprises a molar ratio of 25-55% sterol. For example, the lipid nanoparticle may comprise a molar ratio of 25-50%, 25-45%, 25-40%, 25-35%, 25-30%, 30-55%, 30-50%, 30-45%, 30-40%, 30-35%, 35-55%, 35-50%, 35-45%, 35-40%, 40-55%, 40-50%, 40-45%, 45-55%, 45-50%, or 50-55% sterol. In some embodiments, the lipid nanoparticle comprises a molar ratio of 25%, 30%, 35%, 40%, 45%, 50%, or 55% sterol.

[0253] In some embodiments, the lipid nanoparticle comprises a molar ratio of 0.5-15% PEG-modified lipid. For example, the lipid nanoparticle may comprise a molar ratio of 0.5-10%, 0.5-5%, 1-15%, 1-10%, 1-5%, 2-15%, 2-10%, 2-5%, 5-15%, 5-10%, or 10-15%. In some embodiments, the lipid nanoparticle comprises a molar ratio of 0.5%, 1%, 2%, 3%, 4%, 5%, 6%, 7%, 8%, 9%, 10%, 11%, 12%, 13%, 14%, or 15% PEG-modified lipid.

[0254] In some embodiments, the lipid nanoparticle comprises a molar ratio of 20-60% ionizable cationic lipid, 5-25% non-cationic lipid, 25-55% sterol, and 0.5-15% PEG-modified lipid.

[0255] In some embodiments, an ionizable cationic lipid of the disclosure comprises a compound of Formula (I):

[chemical structure]

[0256] or a salt or isomer thereof, wherein:

[0257] R₁ is selected from the group consisting of C₅₋₃₀ alkyl, C₅₋₂₀ alkenyl, —R*YR″, —YR″, and —R″M′R′;

[0258] R₂ and R₃ are independently selected from the group consisting of H, C₁₋₁₄ alkyl, C₂₋₁₄ alkenyl, —R*YR″, —YR″, and —R*OR″, or R₂ and R₃, together with the atom to which they are attached, form a heterocycle or carbocycle;

[0259] R₄ is selected from the group consisting of a C₃₋₆ carbocycle, —(CH₂)ₙQ, —(CH₂)ₙCHQR, —CHQR, —CQ(R)₂, and unsubstituted C₁₋₆ alkyl, where Q is selected from a carbocycle, heterocycle, —OR, —O(CH₂)ₙN(R)₂, —C(O)OR, —OC(O)R, —CX₃, —CX₂H, —CXH₂, —CN, —N(R)₂, —C(O)N(R)₂, —N(R)C(O)R, —N(R)S(O)₂R, —N(R)C(O)N(R)₂, —N(R)C(S)N(R)₂, —N(R)R₈, —O(CH₂)ₙOR, —N(R)C(═NR₉)N(R)₂, —N(R)C(═CHR₉)N(R)₂, —OC(O)N(R)₂, —N(R)C(O)OR, —N(OR)C(O)R, —N(OR)S(O)₂R, —N(OR)C(O)OR, —N(OR)C(O)N(R)₂, —N(OR)C(S)N(R)₂, —N(OR)C(═NR₉)N(R)₂, —N(OR)C(═CHR₉)N(R)₂, —C(═NR₉)N(R)₂, —C(═NR₉)R, —C(O)N(R)OR, and —C(R)N(R)₂C(O)OR, and each n is independently selected from 1, 2, 3, 4, and 5;

[0260] each R₅ is independently selected from the group consisting of C₁₋₃ alkyl, C₂₋₃ alkenyl, and H;

[0261] each R₆ is independently selected from the group consisting of C₁₋₃ alkyl, C₂₋₃ alkenyl, and H;

[0262] M and M′ are independently selected from —C(O)O—, —OC(O)—, —C(O)N(R′)—,

[0263] —N(R′)C(O)—, —C(O)—, —C(S)—, —C(S)S—, —SC(S)—, —CH(OH)—, —P(O)(OR′)O—, —S(O)₂—, —S —S—, an aryl group, and a heteroaryl group;

[0264] R₇ is selected from the group consisting of C₁₋₃ alkyl, C₂₋₃ alkenyl, and H;

[0265] R₈ is selected from the group consisting of C₃₋₆ carbocycle and heterocycle;

[0266] R₉ is selected from the group consisting of H, CN, NO₂, C₁₋₆ alkyl, —OR, —S(O)₂R, —S(O)₂N(R)₂, C₂₋₆ alkenyl, C₃₋₆ carbocycle and heterocycle;

[0267] each R is independently selected from the group consisting of C₁₋₃ alkyl, C₂₋₃ alkenyl, and H;

[0268] each R′ is independently selected from the group consisting of C₁₋₁₈ alkyl, C₂₋₁₈ alkenyl, —R*YR″, —YR″, and H;

[0269] each R″ is independently selected from the group consisting of C₃₋₁₄ alkyl and

[0270] C₃₋₁₄ alkenyl;

[0271] each R* is independently selected from the group consisting of C₁₋₁₂ alkyl and

[0272] C₂₋₁₂ alkenyl;

[0273] each Y is independently a C₃₋₆ carbocycle;

[0274] each X is independently selected from the group consisting of F, Cl, Br, and I; and

[0275] m is selected from 5, 6, 7, 8, 9, 10, 11, 12, and 13.

[0276] In some embodiments, a subset of compounds of Formula (I) includes those in which when R₄ is —(CH₂)ₙQ, —(CH₂)ₙCHQR, —CHQR, or —CQ(R)₂, then (i) Q is not —N(R)₂ when n is 1, 2, 3, 4 or 5, or (ii) Q is not 5, 6, or 7-membered heterocycloalkyl when n is 1 or 2.

[0277] In some embodiments, another subset of compounds of Formula (I) includes those in which

[0278] R₁ is selected from the group consisting of C₅₋₃₀ alkyl, C₅₋₂₀ alkenyl, —R*YR″, —YR″, and —R″M′R′;

[0279] R₂ and R₃ are independently selected from the group consisting of H, C₁₋₁₄ alkyl, C₂₋₁₄ alkenyl, —R*YR″, —YR″, and —R*OR″, or R₂ and R₃, together with the atom to which they are attached, form a heterocycle or carbocycle;

[0280] R₄ is selected from the group consisting of a C₃₋₆ carbocycle, —(CH₂)ₙQ, —(CH₂)ₙCHQR,

—CHQR, —CQ(R)₂, and unsubstituted C₁₋₆ alkyl, where Q is selected from a C₃₋₆ carbocycle, a 5- to 14-membered heteroaryl having one or more heteroatoms selected from N, O, and S, —OR,
—O(CH₂)—N(R)₂, —C(O)OR, —OC(O)R, —CX₃, —CX₂H, —CXH₂, —CN, —C(O)N(R)₂, —N(R)C(O)R, —N(R)S(O)₂R, —N(R)C(O)N(R)₂, —N(R)C(S)N(R)₂, —CRN(R)₂C(O)OR, —N(R)R₈, —O(CH₂)ₙOR, —N(R)C(═NR₉)N(R)₂, —N(R)C(═CHR₉)N(R)₂, —OC(O)N(R)₂, —N(R)C(O)OR, —N(OR)C(O)R, —N(OR)S(O)₂R, —N(OR)C(O)OR, —N(OR)C(O)N(R)₂, —N(OR)C(S)N(R)₂, —N(OR)C(═NR₉)N(R)₂, —N(OR)C(═CHR₉)N(R)₂, —C(═NR₉)N(R)₂, —C(═NR₉)R, —C(O)N(R)OR, and a 5- to 14-membered heterocycloalkyl having one or more heteroatoms selected from N, O, and S which is substituted with one or more substituents selected from oxo (═O), OH, amino, mono- or di-alkylamino, and C₁₋₃ alkyl, and each n is independently selected from 1, 2, 3, 4, and 5;

[0281] each R₅ is independently selected from the group consisting of C₁₋₃ alkyl, C₂₋₃ alkenyl, and H;

[0282] each R₆ is independently selected from the group consisting of C₁₋₃ alkyl, C₂₋₃ alkenyl, and H;

[0283] M and M′ are independently selected from —C(O)O—, —OC(O)—, —C(O)N(R′)—, —N(R′)C(O)—, —C(O)—, —C(S)—, —C(S)S—, —SC(S)—, —CH(OH)—, —P(O)(OR′)O—, —S(O)₂—, —S—S—, an aryl group, and a heteroaryl group;

[0284] R₇ is selected from the group consisting of C₁₋₃ alkyl, C₂₋₃ alkenyl, and H;

[0285] R₈ is selected from the group consisting of C₃₋₆ carbocycle and heterocycle;

[0286] R₉ is selected from the group consisting of H, CN, NO₂, C₁₋₆ alkyl, —OR, —S(O)₂R, —S(O)₂N(R)₂, C₂₋₆ alkenyl, C₃₋₆ carbocycle and heterocycle;

[0287] each R is independently selected from the group consisting of C₁₋₃ alkyl, C₂₋₃ alkenyl, and H;

[0288] each R′ is independently selected from the group consisting of C₁₋₁₈ alkyl, C₂₋₁₈ alkenyl, —R*YR″, —YR″, and H;

[0289] each R″ is independently selected from the group consisting of C₃₋₁₄ alkyl and C₃₋₁₄ alkenyl;

[0290] each R* is independently selected from the group consisting of C₁₋₁₂ alkyl and C₂₋₁₂ alkenyl;

[0291] each Y is independently a C₃₋₆ carbocycle;

[0292] each X is independently selected from the group consisting of F, Cl, Br, and I; and

[0293] m is selected from 5, 6, 7, 8, 9, 10, 11, 12, and 13, or salts or isomers thereof.

[0294] In some embodiments, another subset of compounds of Formula (I) includes those in which

[0295] R₁ is selected from the group consisting of C₅₋₃₀ alkyl, C₅₋₂₀ alkenyl, —R*YR″, —YR″, and —R″M′R′;

[0296] R₂ and R₃ are independently selected from the group consisting of H, C₁₋₁₄ alkyl, C₂₋₁₄ alkenyl, —R*YR″, —YR″, and —R*OR″, or R₂ and R₃, together with the atom to which they are attached, form a heterocycle or carbocycle;

[0297] R₄ is selected from the group consisting of a C₃₋₆

carbocycle, —(CH₂)ₙQ, —(CH₂)ₙCHQR,
—CHQR, —CQ(R)₂, and unsubstituted C₁₋₆ alkyl, where Q is selected from a C₃₋₆ carbocycle, a 5- to 14-membered heterocycle having one or more heteroatoms selected from N, O, and S, —OR,
—O(CH₂)ₙN(R)₂, —C(O)OR, —OC(O)R, —CX₃, —CX₂H, —CXH₂, —CN, —C(O)N(R)₂, —N(R)C(O)R, —N(R)S(O)₂R, —N(R)C(O)N(R)₂, —N(R)C(S)N(R)₂, —CRN(R)₂C(O)OR, —N(R)R₈, —O(CH₂)ₙOR, —N(R)C(═NR₉)N(R)₂, —N(R)C(═CHR₉)N(R)₂, —OC(O)N(R)₂, —N(R)C(O)OR, —N(OR)C(O)R, —N(OR)S(O)₂R, —N(OR)C(O)OR, —N(OR)C(O)N(R)₂, —N(OR)C(S)N(R)₂, —N(OR)C(═NR₉)N(R)₂, —N(OR)C(═CHR₉)N(R)₂, —C(═NR₉)R, —C(O)N(R)OR,
and —C(═NR₉)N(R)₂, and each n is independently selected from 1, 2, 3, 4, and 5; and when Q is a 5- to 14-membered heterocycle and (i) R₄ is —(CH₂)ₙQ in which n is 1 or 2, or (ii) R₄ is —(CH₂)ₙCHQR in which n is 1, or (iii) R₄ is —CHQR, and —CQ(R)₂, then Q is either a 5- to 14-membered heteroaryl or 8- to 14-membered heterocycloalkyl;

[0298] each R₅ is independently selected from the group consisting of C₁₋₃ alkyl, C₂₋₃ alkenyl, and H;

[0299] each R₆ is independently selected from the group consisting of C₁₋₃ alkyl, C₂₋₃ alkenyl, and H;

[0300] M and M′ are independently selected from —C(O)O—, —OC(O)—, —C(O)N(R′)—, —N(R′)C(O)—, —C(O)—, —C(S)—, —C(S)S—, —SC(S)—, —CH(OH)—, —P(O)(OR′)O—, —S(O)₂—, —S—S—, an aryl group, and a heteroaryl group;

[0301] R₇ is selected from the group consisting of C₁₋₃ alkyl, C₂₋₃ alkenyl, and H;

[0302] R₈ is selected from the group consisting of C₃₋₆ carbocycle and heterocycle;

[0303] R₉ is selected from the group consisting of H, CN, NO₂, C₁₋₆ alkyl, —OR, —S(O)₂R, —S(O)₂N(R)₂, C₂₋₆ alkenyl, C₃₋₆ carbocycle and heterocycle;

[0304] each R is independently selected from the group consisting of C₁₋₃ alkyl, C₂₋₃ alkenyl, and H;

[0305] each R′ is independently selected from the group consisting of C₁₋₁₈ alkyl, C₂₋₁₈ alkenyl, —R*YR″, —YR″, and H;

[0306] each R″ is independently selected from the group consisting of C₃₋₁₄ alkyl and C₃₋₁₄ alkenyl;

[0307] each R* is independently selected from the group consisting of C₁₋₁₂ alkyl and C₂₋₁₂ alkenyl;

[0308] each Y is independently a C₃₋₆ carbocycle;

[0309] each X is independently selected from the group consisting of F, Cl, Br, and I; and

[0310] m is selected from 5, 6, 7, 8, 9, 10, 11, 12, and 13,

[0311] or salts or isomers thereof.

[0312] In some embodiments, another subset of compounds of Formula (I) includes those in which

[0313] R₁ is selected from the group consisting of C₅₋₃₀ alkyl, C₅₋₂₀ alkenyl, —R*YR″, —YR″, and —R″M′R′;

[0314] R₂ and R₃ are independently selected from the group consisting of H, C₁₋₁₄ alkyl, C₂₋₁₄ alkenyl, —R*YR″, —YR″, and —R*OR″, or R₂ and R₃, together with the atom to which they are attached, form a heterocycle or carbocycle;

[0315] R₄ is selected from the group consisting of a C₃₋₆

carbocycle, —(CH₂)ₙQ, —(CH₂)—CHQR, —CHQR, —CQ(R)₂, and unsubstituted C₁₋₆ alkyl, where Q is selected from a C₃₋₆ carbocycle, a 5- to 14-membered heteroaryl having one or more heteroatoms selected from N, O, and S, —OR,
—O(CH₂)—N(R)₂, —C(O)OR, —OC(O)R, —CX₃, —CX₂H, —CXH₂, —CN, —C(O)N(R)₂, —N(R)C(O)R, —N(R)S(O)₂R, —N(R)C(O)N(R)₂, —N(R)C(S)N(R)₂, —CRN(R)₂C(O)OR, —N(R)R₈, —O(CH₂)ₙOR, —N(R)C(═NR₉)N(R)₂, —N(R)C(═CHR₉)N(R)₂, —OC(O)N(R)₂, —N(R)C(O)OR, —N(OR)C(O)R, —N(OR)S(O)₂R, —N(OR)C(O)OR, —N(OR)C(O)N(R)₂, —N(OR)C(S)N(R)₂, —N(OR)C(═NR₉)N(R)₂, —N(OR)C(═CHR₉)N(R)₂, —C(═NR₉)R, —C(O)N(R)OR, and —C(═NR₉)N(R)₂, and each n is independently selected from 1, 2, 3, 4, and 5;

[0316] each R₅ is independently selected from the group consisting of C₁₋₃ alkyl, C₂₋₃ alkenyl, and H;

[0317] each R₆ is independently selected from the group consisting of C₁₋₃ alkyl, C₂₋₃ alkenyl, and H;

[0318] M and M′ are independently selected from —C(O)O—, —OC(O)—, —C(O)N(R′)—, —N(R′)C(O)—, —C(O)—, —C(S)—, —C(S)S—, —SC(S)—, —CH(OH)—, —P(O)(OR′)O—, —S(O)₂—, —S—S—, an aryl group, and a heteroaryl group;

[0319] R₇ is selected from the group consisting of C₁₋₃ alkyl, C₂₋₃ alkenyl, and H;

[0320] R₈ is selected from the group consisting of C₃₋₆ carbocycle and heterocycle;

[0321] R₉ is selected from the group consisting of H, CN, NO₂, C₁₋₆ alkyl, —OR, —S(O)₂R, —S(O)₂N(R)₂, C₂₋₆ alkenyl, C₃₋₆ carbocycle and heterocycle;

[0322] each R is independently selected from the group consisting of C₁₋₃ alkyl, C₂₋₃ alkenyl, and H;

[0323] each R′ is independently selected from the group consisting of C₁₋₁₈ alkyl, C₂₋₁₈ alkenyl, —R*YR″, —YR″, and H;

[0324] each R″ is independently selected from the group consisting of C₃₋₁₄ alkyl and C₃₋₁₄ alkenyl;

[0325] each R* is independently selected from the group consisting of C₁₋₁₂ alkyl and C₂₋₁₂ alkenyl;

[0326] each Y is independently a C₃₋₆ carbocycle;

[0327] each X is independently selected from the group consisting of F, Cl, Br, and I; and

[0328] m is selected from 5, 6, 7, 8, 9, 10, 11, 12, and 13,

[0329] or salts or isomers thereof.

[0330] In some embodiments, another subset of compounds of Formula (I) includes those in which

[0331] R₁ is selected from the group consisting of C₅₋₃₀ alkyl, C₅₋₂₀ alkenyl, —R*YR″, —YR″, and —R″M′R′;

[0332] R₂ and R₃ are independently selected from the group consisting of H, C₂₋₁₄ alkyl, C₂₋₁₄ alkenyl, —R*YR″, —YR″, and —R*OR″, or R₂ and R₃, together with the atom to which they are attached, form a heterocycle or carbocycle;

[0333] R₄ is —(CH₂)ₙQ or —(CH₂)ₙCHQR, where Q is —N(R)₂, and n is selected from 3, 4, and 5;

[0334] each R₅ is independently selected from the group consisting of C₁₋₃ alkyl, C₂₋₃ alkenyl, and H;

[0335] each R₆ is independently selected from the group consisting of C₁₋₃ alkyl, C₂₋₃ alkenyl, and H;

[0336] M and M′ are independently selected from —C(O)O—, —OC(O)—, —C(O)N(R′)—, —N(R′)C(O)—, —C(O)—, —C(S)—, —C(S)S—, —SC(S)—, —CH(OH)—, —P(O)(OR′)O—, —S(O)₂—, —S—S—, an aryl group, and a heteroaryl group;

[0337] R₇ is selected from the group consisting of C₁₋₃ alkyl, C₂₋₃ alkenyl, and H;

[0338] each R is independently selected from the group consisting of C₁₋₃ alkyl, C₂₋₃ alkenyl, and H;

[0339] each R′ is independently selected from the group consisting of C₁₋₁₈ alkyl, C₂₋₁₈ alkenyl, —R*YR″, —YR″, and H;

[0340] each R″ is independently selected from the group consisting of C₃₋₁₄ alkyl and C₃₋₁₄ alkenyl;

[0341] each R* is independently selected from the group consisting of C₁₋₁₂ alkyl and C₁₋₁₂ alkenyl;

[0342] each Y is independently a C₃₋₆ carbocycle;

[0343] each X is independently selected from the group consisting of F, Cl, Br, and I; and

[0344] m is selected from 5, 6, 7, 8, 9, 10, 11, 12, and 13, or salts or isomers thereof.

[0345] In some embodiments, another subset of compounds of Formula (I) includes those in which

[0346] R₁ is selected from the group consisting of C₅₋₃₀ alkyl, C₅₋₂₀ alkenyl, —R*YR″, —YR″, and —R″M′R′;

[0347] R₂ and R₃ are independently selected from the group consisting of C₁₋₁₄ alkyl, C₂₋₁₄ alkenyl, —R*YR″, —YR″, and —R*OR″, or R₂ and R₃, together with the atom to which they are attached, form a heterocycle or carbocycle;

[0348] R₄ is selected from the group consisting of —(CH₂)ₙQ, —(CH₂)ₙCHQR, —CHQR, and —CQ(R)₂, where Q is —N(R)₂, and n is selected from 1, 2, 3, 4, and 5;

[0349] each R₅ is independently selected from the group consisting of C₁₋₃ alkyl, C₂₋₃ alkenyl, and H;

[0350] each R₆ is independently selected from the group consisting of C₁₋₃ alkyl, C₂₋₃ alkenyl, and H;

[0351] M and M′ are independently selected from —C(O)O—, —OC(O)—, —C(O)N(R′)—, —N(R′)C(O)—, —C(O)—, —C(S)—, —C(S)S—, —SC(S)—, —CH(OH)—, —P(O)(OR′)O—, —S(O)₂—, —S—S—, an aryl group, and a heteroaryl group;

[0352] R₇ is selected from the group consisting of C₁₋₃ alkyl, C₂₋₃ alkenyl, and H;

[0353] each R is independently selected from the group consisting of C₁₋₃ alkyl, C₂₋₃ alkenyl, and H;

[0354] each R′ is independently selected from the group consisting of C₁₋₁₈ alkyl, C₂₋₁₈ alkenyl, —R*YR″, —YR″, and H;

[0355] each R″ is independently selected from the group consisting of C₃₋₁₄ alkyl and C₃₋₁₄ alkenyl;

[0356] each R* is independently selected from the group consisting of C₁₋₁₂ alkyl and C₁₋₁₂ alkenyl;

[0357] each Y is independently a C₃₋₆ carbocycle;

[0358] each X is independently selected from the group consisting of F, Cl, Br, and I; and

[0359] m is selected from 5, 6, 7, 8, 9, 10, 11, 12, and 13,

[0360] or salts or isomers thereof.

[0361] In some embodiments, a subset of compounds of Formula (I) includes those of Formula (IA):

[chemical structure]

[0362] or a salt or isomer thereof, wherein 1 is selected from 1, 2, 3, 4, and 5; m is selected from 5, 6, 7, 8, and 9; M₁ is a bond or M′; R₄ is unsubstituted C₁₋₃ alkyl, or —(CH₂)ₙQ, in which Q is OH, —NHC(S)N(R)₂, —NHC(O)N(R)₂, —N(R)C(O)R, —N(R)S(O)₂R, —N(R)R₈, —NHC(═NR₉)N(R)₂, —NHC(═CHR₉)N(R)₂, —OC(O)N(R)₂, —N(R)C(O)OR, heteroaryl or heterocycloalkyl; M and M′ are independently selected from —C(O)O—, —OC(O)—, —C(O)N(R′)—, —P(O)(OR′)O—, —S—S—, an aryl group, and a heteroaryl group; and R₂ and R₃ are independently selected from the group consisting of H, C₁₋₁₄ alkyl, and C₂₋₁₄ alkenyl.

[0363] In some embodiments, a subset of compounds of Formula (I) includes those of Formula (II):

[chemical structure]

or a salt or isomer thereof, wherein 1 is selected from 1, 2, 3, 4, and 5; M₁ is a bond or M′; R₄ is unsubstituted C₁₋₃ alkyl, or —(CH₂)ₙQ, in which n is 2, 3, or 4, and Q is
OH, —NHC(S)N(R)₂, —NHC(O)N(R)₂, —N(R)C(O)R, —N(R)S(O)₂R, —N(R)R₈, —NHC(═NR₉)N(R)₂, —NHC(═CHR₉)N(R)₂, —OC(O)N(R)₂, —N(R)C(O)OR, heteroaryl or heterocycloalkyl; M and M′ are independently selected
from —C(O)O—, —OC(O)—, —C(O)N(R′)—, —P(O)(OR′)O—, —S—S—, an aryl group, and a heteroaryl group; and R₂ and R₃ are independently selected from the group consisting of H, C₁₋₁₄ alkyl, and C₂₋₁₄ alkenyl.

[0364] In some embodiments, a subset of compounds of Formula (I) includes those of Formula (IIa), (IIb), (IIc), or (IIe):

[chemical structure]

[0365] or a salt or isomer thereof, wherein R₄ is as described herein.

[0366] In some embodiments, a subset of compounds of Formula (I) includes those of Formula (IId):

[chemical structure]

[0367] or a salt or isomer thereof, wherein n is 2, 3, or 4; and m, R′, R″, and R₂ through R₆ are as described herein. For example, each of R₂ and R₃ may be independently selected from the group consisting of C₅₋₁₄ alkyl and C₅₋₁₄ alkenyl.

[0368] In some embodiments, an ionizable cationic lipid of the disclosure comprises a compound having structure:

[chemical structure]

[0369] In some embodiments, a non-cationic lipid of the disclosure comprises 1,2-distearoyl-sn-glycero-3-phosphocholine (DSPC), 1,2-dioleoyl-sn-glycero-3-phosphoethanolamine (DOPE), 1,2-dilinoleoyl-sn-glycero-3-phosphocholine (DLPC), 1,2-dimyristoyl-sn-gly cero-phosphocholine (DMPC), 1,2-dioleoyl-sn-glycero-3-phosphocholine (DOPC), 1,2-dipalmitoyl-sn-glycero-3-phosphocholine (DPPC), 1,2-diundecanoyl-sn-glycero-phosphocholine (DUPC), 1-palmitoyl-2-oleoyl-sn-glycero-3-phosphocholine (POPC), 1,2-di-O-octadecenyl-sn-glycero-3-phosphocholine (18:0 Diether PC), 1-oleoyl-2 cholesterylhemisuccinoyl-sn-glycero-3-phosphocholine (OChemsPC), 1-hexadecyl-sn-glycero-3-phosphocholine (C16 Lyso PC), 1,2-dilinolenoyl-sn-glycero-3-phosphocholine,1,2-diarachidonoyl-sn-glycero-3-phosphocholine, 1,2-didocosahexaenoyl-sn-glycero-3-phosphocholine, 1,2-diphytanoyl-sn-glycero-3-phosphoethanolamine (ME 16.0 PE), 1,2-distearoyl-sn-glycero-3-phosphoethanolamine, 1,2-dilinoleoyl-sn-glycero-3-phosphoethanolamine, 1,2-dilinolenoyl-sn-glycero-3-phosphoethanolamine, 1,2-diarachidonoyl-sn-glycero-3-phosphoethanolamine, 1,2-didocosahexaenoyl-sn-glycero-3-phosphoethanolamine, 1,2-dioleoyl-sn-glycero-3-phospho-rac-(1-glycerol) sodium salt (DOPG), sphingomyelin, and mixtures thereof.

[0370] In some embodiments, a PEG modified lipid of the disclosure comprises a PEG-modified phosphatidylethanolamine, a PEG-modified phosphatidic acid, a PEG-modified ceramide, a PEG-modified dialkylamine, a PEG-modified diacylglycerol, a PEG-modified dialkylglycerol, and mixtures thereof. In some embodiments, the PEG-modified lipid is PEG-DMG, PEG-c-DOMG (also referred to as PEG-DOMG), PEG-DSG and/or PEG-DPG.

[0371] In some embodiments, a sterol of the disclosure comprises cholesterol, fecosterol, sitosterol, ergosterol, campesterol, stigmasterol, bras sicasterol, tomatidine, ursolic acid, alpha-tocopherol, and mixtures thereof.

[0372] In some embodiments, a LNP of the disclosure comprises an ionizable cationic lipid of Compound 1, wherein the non-cationic lipid is DSPC, the structural lipid that is cholesterol, and the PEG lipid is PEG-DMG.

[0373] In some embodiments, a LNP of the disclosure comprises an N:P ratio of from about 2:1 to about 30:1.

[0374] In some embodiments, a LNP of the disclosure comprises an N:P ratio of about 6:1.

[0375] In some embodiments, a LNP of the disclosure comprises an N:P ratio of about 3:1.

[0376] In some embodiments, a LNP of the disclosure comprises a wt/wt ratio of the ionizable cationic lipid component to the RNA of from about 10:1 to about 100:1.

[0377] In some embodiments, a LNP of the disclosure comprises a wt/wt ratio of the ionizable cationic lipid component to the RNA of about 20:1.

[0378] In some embodiments, a LNP of the disclosure comprises a wt/wt ratio of the ionizable cationic lipid component to the RNA of about 10:1.

[0379] In some embodiments, a LNP of the disclosure has a mean diameter from about 50 nm to about 150 nm.

[0380] In some embodiments, a LNP of the disclosure has a mean diameter from about 70 nm to about 120 nm.

### Multivalent Vaccines

[0381] The EBOV and/or MARV vaccines, as provided herein, may include an RNA (e.g. mRNA) or multiple RNAs encoding two or more antigens of the same EBOV orMARV species. In some embodiments, a EBOV and/or MARV vaccine includes an RNA or multiple RNAs encoding two or more antigens selected from glycoprotein (GP), surface EBOV GP, wild type EBOV GP, sGP, delta peptide (Δ-peptide), GP1, GP1,2Δ and/or a MARV glycoprotein (GP) antigens. In some embodiments, the RNA (at least one RNA) of a EBOV and/or MARV vaccine may encode 1, 2, 3, 4, 5, 6, 7, 8, 9, 10, 11, 12, or more antigens.

[0382] In some embodiments, a EBOV and/or MARV vaccine comprises at least one, two or three RNA encoding a MARV GP antigen.

[0383] In some embodiments, a EBOV and/or MARV vaccine comprises at least one, two or three RNA encoding a EBOV GP antigens.

[0384] In some embodiments, a EBOV and/or MARV vaccine comprises at least one RNA encoding EBOV antigens and at least one RNA encoding MARV antigens.

[0385] In some embodiments, a EBOV and/or MARV vaccine comprises at least one RNA encoding EBOV and MARV antigens.

[0386] In some embodiments, two or more different RNA (e.g., mRNA) encoding antigens may be formulated in the same lipid nanoparticle. In other embodiments, two or more different RNA encoding antigens may be formulated in separate lipid nanoparticles (each RNA formulated in a single lipid nanoparticle). The lipid nanoparticles may then be combined and administered as a single vaccine composition (e.g., comprising multiple RNA encoding multiple antigens) or may be administered separately.

### Combination Vaccines

[0387] The EBOV and/or MARV vaccines, as provided herein, may include an RNA or multiple RNAs encoding two or more antigens of the same or different EBOV and/or MARV species. Also provided herein are combination vaccines that include RNA encoding one or more EBOV and/or MARV antigen(s) and one or more antigen(s) of a different organisms (e.g., bacterial and/or viral organism). Thus, the vaccines of the present disclosure may be combination vaccines that target one or more antigens of the same species, or one or more antigens of different species, e.g., antigens which induce immunity to organisms which are found in the same geographic areas where the risk of EBOV and/or MARV infection is high or organisms to which an individual is likely to be exposed to when exposed to EBOV and/or MARV.

### Modes of Vaccine Administration

[0388] Ebola virus and/or Marburg virus RNA vaccines may be administered by any route which results in a therapeutically effective outcome. These include, but are not limited, to intradermal, intramuscular, and/or subcutaneous administration. The present disclosure provides methods comprising administering RNA vaccines to a subject in need thereof. The exact amount required will vary from subject to subject, depending on the species, age, and general condition of the subject, the severity of the disease, the particular composition, its mode of administration, its mode of activity, and the like. Ebola virus and/or Marburg virus RNA vaccines compositions are typically formulated in dosage unit form for ease of administration and uniformity of dosage. It will be understood, however, that the total daily usage of Ebola virus and/or Marburg virus RNA vaccines compositions may be decided by the attending physician within the scope of sound medical judgment. The specific therapeutically effective, prophylactically effective, or appropriate imaging dose level for any particular patient will depend upon a variety of factors including the disorder being treated and the severity of the disorder; the activity of the specific compound employed; the specific composition employed; the age, body weight, general health, sex and diet of the patient; the time of administration, route of administration, and rate of excretion of the specific compound employed; the duration of the treatment; drugs used in combination or coincidental with the specific compound employed; and like factors well known in the medical arts.

[0389] In some embodiments, Ebola virus and/or Marburg virus RNA vaccines compositions may be administered at dosage levels sufficient to deliver 0.0001 mg/kg to 100 mg/kg, 0.001 mg/kg to 0.05 mg/kg, 0.005 mg/kg to 0.05 mg/kg, 0.001 mg/kg to 0.005 mg/kg, 0.05 mg/kg to 0.5 mg/kg, 0.01 mg/kg to 50 mg/kg, 0.1 mg/kg to 40 mg/kg, 0.5 mg/kg to 30 mg/kg, 0.01 mg/kg to 10 mg/kg, 0.1 mg/kg to 10 mg/kg, or 1 mg/kg to 25 mg/kg, of subject body weight per day, one or more times a day, per week, per month, etc. to obtain the desired therapeutic, diagnostic, prophylactic, or imaging effect (see e.g., the range of unit doses described in International Publication No WO2013078199, herein incorporated by reference in its entirety). The desired dosage may be delivered three times a day, two times a day, once a day, every other day, every third day, every week, every two weeks, every three weeks, every four weeks, every 2 months, every three months, every 6 months, etc. In certain embodiments, the desired dosage may be delivered using multiple administrations (e.g., two, three, four, five, six, seven, eight, nine, ten, eleven, twelve, thirteen, fourteen, or more administrations). When multiple administrations are employed, split dosing regimens such as those described herein may be used. In exemplary embodiments, Ebola virus and/or Marburg virus RNA vaccines compositions may be administered at dosage levels sufficient to deliver 0.0005 mg/kg to 0.01 mg/kg, e.g., about 0.0005 mg/kg to about 0.0075 mg/kg, e.g., about 0.0005 mg/kg, about 0.001 mg/kg, about 0.002 mg/kg, about 0.003 mg/kg, about 0.004 mg/kg or about 0.005 mg/kg.

[0390] In some embodiments, Ebola virus and/or Marburg virus RNA vaccine compositions may be administered once or twice (or more) at dosage levels sufficient to deliver 0.025 mg/kg to 0.250 mg/kg, 0.025 mg/kg to 0.500 mg/kg, 0.025 mg/kg to 0.750 mg/kg, or 0.025 mg/kg to 1.0 mg/kg.

[0391] In some embodiments, Ebola virus and/or Marburg virus RNA vaccine compositions may be administered twice (e.g., Day 0 and Day 7, Day 0 and Day 14, Day 0 and Day 21, Day 0 and Day 28, Day 0 and Day 60, Day 0 and Day 90, Day 0 and Day 120, Day 0 and Day 150, Day 0 and Day 180, Day 0 and 3 months later, Day 0 and 6 months later, Day 0 and 9 months later, Day 0 and 12 months later, Day 0 and 18 months later, Day 0 and 2 years later, Day 0 and 5 years later, or Day 0 and 10 years later) at a total dose of or at dosage levels sufficient to deliver a total dose of 0.0100 mg, 0.025 mg, 0.050 mg, 0.075 mg, 0.100 mg, 0.125 mg, 0.150 mg, 0.175 mg, 0.200 mg, 0.225 mg, 0.250 mg, 0.275 mg, 0.300 mg, 0.325 mg, 0.350 mg, 0.375 mg, 0.400 mg, 0.425 mg, 0.450 mg, 0.475 mg, 0.500 mg, 0.525 mg, 0.550 mg, 0.575 mg, 0.600 mg, 0.625 mg, 0.650 mg, 0.675 mg, 0.700 mg, 0.725 mg, 0.750 mg, 0.775 mg, 0.800 mg, 0.825 mg, 0.850 mg, 0.875 mg, 0.900 mg, 0.925 mg, 0.950 mg, 0.975 mg, or 1.0 mg. Higher and lower dosages and frequency of administration are encompassed by the present disclosure. For example, a Ebola virus and/or Marburg virus RNA vaccine composition may be administered three or four times.

[0392] In some embodiments, Ebola virus and/or Marburg virus RNA vaccine compositions may be administered twice (e.g., Day 0 and Day 7, Day 0 and Day 14, Day 0 and Day 21, Day 0 and Day 28, Day 0 and Day 60, Day 0 and Day 90, Day 0 and Day 120, Day 0 and Day 150, Day 0 and Day 180, Day 0 and 3 months later, Day 0 and 6 months later, Day 0 and 9 months later, Day 0 and 12 months later, Day 0 and 18 months later, Day 0 and 2 years later, Day 0 and 5 years later, or Day 0 and 10 years later) at a total dose of or at dosage levels sufficient to deliver a total dose of 0.010 mg, 0.025 mg, 0.100 mg or 0.400 mg.

[0393] In some embodiments the RNA vaccine for use in a method of vaccinating a subject is administered the subject a single dosage of between 10 μg/kg and 400 μg/kg of the nucleic acid vaccine in an effective amount to vaccinate the subject. In some embodiments the RNA vaccine for use in a method of vaccinating a subject is administered the subject a single dosage of between 10 μg and 400 μg of the nucleic acid vaccine in an effective amount to vaccinate the subject.

[0394] A RNA vaccine pharmaceutical composition described herein can be formulated into a dosage form described herein, such as an intranasal, intratracheal, or injectable (e.g., intravenous, intraocular, intravitreal, intramuscular, intradermal, intracardiac, intraperitoneal, and subcutaneous).

[0395] Some aspects of the present disclosure provide formulations of the Ebola virus and/or Marburg virus RNA (e.g., mRNA) vaccine, wherein the Ebola virus and/or Marburg virus RNA vaccine is formulated in an effective amount to produce an antigen specific immune response in a subject (e.g., production of antibodies specific to an anti-Ebola virus antigenic polypeptide and/or an anti-Marburg virus antigenic polypeptide). “An effective amount” is a dose of an Ebola virus and/or Marburg virus RNA (e.g., mRNA) vaccine effective to produce an antigen-specific immune response. Also provided herein are methods of inducing an antigen-specific immune response in a subject.

[0396] In some embodiments, the antigen-specific immune response is characterized by measuring an anti-Ebola virus and/or an anti-Marburg virus antigenic polypeptide antibody titer produced in a subject administered a Ebola virus and/or Marburg virus RNA (e.g., mRNA) vaccine as provided herein. An antibody titer is a measurement of the amount of antibodies within a subject, for example, antibodies that are specific to a particular antigen (e.g., an anti-Ebola virus and/or anti-Marburg virus antigenic polypeptide) or epitope of an antigen. Antibody titer is typically expressed as the inverse of the greatest dilution that provides a positive result. Enzyme-linked immunosorbent assay (ELISA) is a common assay for determining antibody titers, for example.

[0397] In some embodiments, an antibody titer is used to assess whether a subject has had an infection or to determine whether immunizations are required. In some embodiements, an antibody titer is used to determine the strength of an autoimmune response, to determine whether a booster immunization is needed, to derermine whether a previous vaccine was effective, and to identify any recent or prior infections. In accordance with the present disclosure, an antibody titer may be used to determine the strength of an immune response induced in a subject by the Ebola virus and/or Marburg virus RNA vaccine.

[0398] In some embodiments, an anti-Ebola virus and/or an anti-Marburg virus antigenic polypeptide antibody titer produced in a subject is increased by at least 1 log relative to a control. For example, anti-antigenic polypeptide antibody titer produced in a subject may be increased by at least 1.5, at least 2, at least 2.5, or at least 3 log relative to a control. In some embodiments, the anti-Ebola virus and/or anti-Marburg virus antigenic polypeptide antibody titer produced in the subject is increased by 1, 1.5, 2, 2.5 or 3 log relative to a control. In some embodiments, the anti-Ebola virus and/or anti-Marburg virus antigenic polypeptide antibody titer produced in the subject is increased by 1-3 log relative to a control. For example, the anti-Ebola virus and/or anti-Marburg virus antigenic polypeptide antibody titer produced in a subject may be increased by 1-1.5, 1-2, 1-2.5, 1-3, 1.5-2, 1.5-2.5, 1.5-3, 2-2.5, 2-3, or 2.5-3 log relative to a control.

[0399] In some embodiments, the anti-Ebola virus and/or anti-Marburg virus antigenic polypeptide antibody titer produced in a subject is increased at least 2 times relative to a control. For example, the anti-Ebola virus and/or anti-Marburg virus antigenic polypeptide antibody titer produced in a subject may be increased at least 3 times, at least 4 times, at least 5 times, at least 6 times, at least 7 times, at least 8 times, at least 9 times, or at least 10 times relative to a control. In some embodiments, the anti-Ebola virus and/or anti-Marburg virus antigenic polypeptide antibody titer produced in the subject is increased 2, 3, 4, 5, 6, 7, 8, 9, or 10 times relative to a control. In some embodiments, the anti-Ebola virus and/or anti-Marburg virus antigenic polypeptide antibody titer produced in a subject is increased 2-10 times relative to a control. For example, the anti-Ebola virus and/or anti-Marburg virus antigenic polypeptide antibody titer produced in a subject may be increased 2-10, 2-9, 2-8, 2-7, 2-6, 2-5, 2-4, 2-3, 3-10, 3-9, 3-8, 3-7, 3-6, 3-5, 3-4, 4-10, 4-9, 4-8, 4-7, 4-6, 4-5, 5-10, 5-9, 5-8, 5-7, 5-6, 6-10, 6-9, 6-8, 6-7, 7-10, 7-9, 7-8, 8-10, 8-9, or 9-10 times relative to a control.

[0400] A control, in some embodiments, is the anti-Ebola virus and/or anti-Marburg virus antigenic polypeptide antibody titer produced in a subject who has not been administered a Ebola virus and/or Marburg virus RNA (e.g., mRNA) vaccine. In some embodiments, a control is an anti-Ebola virus and/or anti-Marburg virus antigenic polypeptide antibody titer produced in a subject who has been administered a live attenuated Ebola virus and/or Marburg virus vaccine. An attenuated vaccine is a vaccine produced by reducing the virulence of a viable (live). An attenuated virus is altered in a manner that renders it harmless or less virulent relative to live, unmodified virus. In some embodiments, a control is an anti-Ebola virus and/or anti-Marburg virus antigenic polypeptide antibody titer produced in a subject administered inactivated Ebola virus and/or Marburg virus vaccine. In some embodiments, a control is an anti-Ebola virus and/or anti-Marburg virus antigenic polypeptide antibody titer produced in a subject administered a recombinant or purified Ebola virus and/or Marburg virus protein vaccine. Recombinant protein vaccines typically include protein antigens that either have been produced in a heterologous expression system (e.g., bacteria or yeast) or purified from large amounts of the pathogenic organism. In other embodiments the control is ChAd3-EBO-Z, Chimpanzee adenovirus vector for single IM dose by GSK. In other embodiments the control is VSV-EBOV, a recombinant, replication-competent vaccine, consisting of a vesicular stomatitis virus, which has been genetically engineered to express Ebola and/or Marburg glycoproteins so as to provoke an immune response against the complete Ebola virus and/or Marburg virus.

[0401] In some embodiments the vaccination protocol is a ring vaccination. A ring vaccination vaccinates all suspected individuals in an area around an outbreak (e.g., family members of those infected).

[0402] In some embodiments, an effective amount of an Ebola virus and/or Marburg virus RNA (e.g., mRNA) vaccine is a dose that is reduced compared to the standard of care dose of a recombinant Ebola virus and/or Marburg virus protein vaccine. A “standard of care,” as provided herein, refers to a medical or psychological treatment guideline and can be general or specific. “Standard of care” specifies appropriate treatment based on scientific evidence and collaboration between medical professionals involved in the treatment of a given condition. It is the diagnostic and treatment process that a physician/clinician should follow for a certain type of patient, illness or clinical circumstance. A “standard of care dose,” as provided herein, refers to the dose of a recombinant or purified Ebola virus and/or Marburg virus protein vaccine, or a live attenuated or inactivated Ebola virus and/or Marburg virus vaccine, that a physician/clinician or other medical professional would administer to a subject to treat or prevent Ebola virus and/or Marburg virus, or a Ebola virus-related and/or Marburg virus-related condition, while following the standard of care guideline for treating or preventing Ebola virus and/or Marburg virus, or a Ebola virus-related and/or Marburg virus-related condition.

[0403] In some embodiments, the anti-Ebola virus and/or anti-Marburg virus antigenic polypeptide antibody titer produced in a subject administered an effective amount of a Ebola virus and/or Marburg virus RNA vaccine is equivalent to an anti-Ebola virus and/or anti-Marburg virus antigenic polypeptide antibody titer produced in a control subject administered a standard of care dose of a recombinant or purified Ebola virus and/or Marburg virus protein vaccine or a live attenuated or inactivated Ebola virus and/or Marburg virus vaccine.

[0404] In some embodiments, an effective amount of a Ebola virus and/or Marburg virus RNA (e.g., mRNA) vaccine is a dose equivalent to an at least 2-fold reduction in a standard of care dose of a recombinant or purified Ebola virus and/or Marburg virus protein vaccine. For example, an effective amount of a Ebola virus and/or Marburg virus RNA vaccine may be a dose equivalent to an at least 3-fold, at least 4-fold, at least 5-fold, at least 6-fold, at least 7-fold, at least 8-fold, at least 9-fold, or at least 10-fold reduction in a standard of care dose of a recombinant or purified Ebola virus and/or Marburg virus protein vaccine. In some embodiments, an effective amount of a Ebola virus and/or Marburg virus RNA vaccine is a dose equivalent to an at least at least 100-fold, at least 500-fold, or at least 1000-fold reduction in a standard of care dose of a recombinant or purified Ebola virus and/or Marburg virus protein vaccine. In some embodiments, an effective amount of a Ebola virus and/or Marburg virus RNA vaccine is a dose equivalent to a 2-, 3-, 4-, 5-, 6-, 7-, 8-, 9-, 10-, 20-, 50-, 100-, 250-, 500-, or 1000-fold reduction in a standard of care dose of a recombinant or purified Ebola virus and/or Marburg virus protein vaccine. In some embodiments, the anti-Ebola virus and/or anti-Marburg virus antigenic polypeptide antibody titer produced in a subject administered an effective amount of a Ebola virus and/or Marburg virus RNA vaccine is equivalent to an anti-Ebola virus and/or anti-Marburg virus antigenic polypeptide antibody titer produced in a control subject administered the standard of care dose of a recombinant or protein Ebola virus and/or Marburg virus protein vaccine or a live attenuated or inactivated Ebola virus and/or Marburg virus vaccine. In some embodiments, an effective amount of a Ebola virus and/or Marburg virus RNA (e.g., mRNA) vaccine is a dose equivalent to a 2-fold to 1000-fold (e.g., 2-fold to 100-fold, 10-fold to 1000-fold) reduction in the standard of care dose of a recombinant or purified Ebola virus and/or Marburg virus protein vaccine, wherein the anti-Ebola virus and/or anti-Marburg virus antigenic polypeptide antibody titer produced in the subject is equivalent to an anti-Ebola virus and/or anti-Marburg virus antigenic polypeptide antibody titer produced in a control subject administered the standard of care dose of a recombinant or purified Ebola virus and/or Marburg virus protein vaccine or a live attenuated or inactivated Ebola virus and/or Marburg virus vaccine.

[0405] In some embodiments, the effective amount of a Ebola virus and/or Marburg virus RNA (e.g., mRNA) vaccine is a dose equivalent to a 2 to 1000-, 2 to 900-, 2 to 800-, 2 to 700-, 2 to 600-, 2 to 500-, 2 to 400-, 2 to 300-, 2 to 200-, 2 to 100-, 2 to 90-, 2 to 80-, 2 to 70-, 2 to 60-, 2 to 50-, 2 to 40-, 2 to 30-, 2 to 20-, 2 to 10-, 2 to 9-, 2 to 8-, 2 to 7-, 2 to 6-, 2 to 5-, 2 to 4-, 2 to 3-, 3 to 1000-, 3 to 900-, 3 to 800-, 3 to 700-, 3 to 600-, 3 to 500-, 3 to 400-, 3 to 3 to 00-, 3 to 200-, 3 to 100-, 3 to 90-, 3 to 80-, 3 to 70-, 3 to 60-, 3 to 50-, 3 to 40-, 3 to 30-, 3 to 20-, 3 to 10-, 3 to 9-, 3 to 8-, 3 to 7-, 3 to 6-, 3 to 5-, 3 to 4-, 4 to 1000-, 4 to 900-, 4 to 800-, 4 to 700-, 4 to 600-, 4 to 500-, 4 to 400-, 4 to 4 to 00-, 4 to 200-, 4 to 100-, 4 to 90-, 4 to 80-, 4 to 70-, 4 to 60-, 4 to 50-, 4 to 40-, 4 to 30-, 4 to 20-, 4 to 10-, 4 to 9-, 4 to 8-, 4 to 7-, 4 to 6-, 4 to 5-, 4 to 4-, 5 to 1000-, 5 to 900-, 5 to 800-, 5 to 700-, 5 to 600-, 5 to 500-, 5 to 400-, 5 to 300-, 5 to 200-, 5 to 100-, 5 to 90-, 5 to 80-, 5 to 70-, 5 to 60-, 5 to 50-, 5 to 40-, 5 to 30-, 5 to 20-, 5 to 10-, 5 to 9-, 5 to 8-, 5 to 7-, 5 to 6-, 6 to 1000-, 6 to 900-, 6 to 800-, 6 to 700-, 6 to 600-, 6 to 500-, 6 to 400-, 6 to 300-, 6 to 200-, 6 to 100-, 6 to 90-, 6 to 80-, 6 to 70-, 6 to 60-, 6 to 50-, 6 to 40-, 6 to 30-, 6 to 20-, 6 to 10-, 6 to 9-, 6 to 8-, 6 to 7-, 7 to 1000-, 7 to 900-,7 to 800-, 7 to 700-, 7 to 600-, 7 to 500-, 7 to 400-, 7 to 300-, 7 to 200-, 7 to 100-, 7 to 90-, 7 to 80-, 7 to 70-, 7 to 60-, 7 to 50-, 7 to 40-, 7 to 30-, 7 to 20-, 7 to 10-, 7 to 9-, 7 to 8-, 8 to 1000-, 8 to 900-, 8 to 800-, 8 to 700-, 8 to 600-, 8 to 500-, 8 to 400-, 8 to 300-, 8 to 200-, 8 to 100-, 8 to 90-, 8 to 80-, 8 to 70-, 8 to 60-, 8 to 50-, 8 to 40-, 8 to 30-, 8 to 20-, 8 to 10-, 8 to 9-, 9 to 1000-, 9 to 900-, 9 to 800-, 9 to 700-, 9 to 600-, 9 to 500-, 9 to 400-, 9 to 300-, 9 to 200-, 9 to 100-, 9 to 90-, 9 to 80-, 9 to 70-, 9 to 60-, 9 to 50-, 9 to 40-, 9 to 30-, 9 to 20-, 9 to 10-, 10 to 1000-, 10 to 900-, 10 to 800-, 10 to 700-, 10 to 600-, 10 to 500-, 10 to 400-, 10 to 300-, 10 to 200-, 10 to 100-, 10 to 90-, 10 to 80-, 10 to 70-, 10 to 60-, 10 to 50-, 10 to 40-, 10 to 30-, 10 to 20-, 20 to 1000-, 20 to 900-, 20 to 800-, 20 to 700-, 20 to 600-, 20 to 500-, 20 to 400-, 20 to 300-, 20 to 200-, 20 to 100-, 20 to 90-, 20 to 80-, 20 to 70-, 20 to 60-, 20 to 50-, 20 to 40-, 20 to 30-, 30 to 1000-, 30 to 900-, 30 to 800-, 30 to 700-, 30 to 600-, 30 to 500-, 30 to 400-, 30 to 300-, 30 to 200-, 30 to 100-, 30 to 90-, 30 to 80-, 30 to 70-, 30 to 60-, 30 to 50-, 30 to 40-, 40 to 1000-, 40 to 900-, 40 to 800-, 40 to 700-, 40 to 600-, 40 to 500-, 40 to 400-, 40 to 300-, 40 to 200-, 40 to 100-, 40 to 90-, 40 to 80-, 40 to 70-, 40 to 60-, 40 to 50-, 50 to 1000-, 50 to 900-, 50 to 800-, 50 to 700-, 50 to 600-, 50 to 500-, 50 to 400-, 50 to 300-, 50 to 200-, 50 to 100-, 50 to 90-, 50 to 80-, 50 to 70-, 50 to 60-, 60 to 1000-, 60 to 900-, 60 to 800-, 60 to 700-, 60 to 600-, 60 to 500-, 60 to 400-, 60 to 300-, 60 to 200-, 60 to 100-, 60 to 90-, 60 to 80-, 60 to 70-, 70 to 1000-, 70 to 900-, 70 to 800-, 70 to 700-, 70 to 600-, 70 to 500-, 70 to 400-, 70 to 300-, 70 to 200-, 70 to 100-, 70 to 90-, 70 to 80-, 80 to 1000-, 80 to 900-, 80 to 800-, 80 to 700-, 80 to 600-, 80 to 500-, 80 to 400-, 80 to 300-, 80 to 200-, 80 to 100-, 80 to 90-, 90 to 1000-, 90 to 900-, 90 to 800-, 90 to 700-, 90 to 600-, 90 to 500-, 90 to 400-, 90 to 300-, 90 to 200-, 90 to 100-, 100 to 1000-, 100 to 900-, 100 to 800-, 100 to 700-, 100 to 600-, 100 to 500-, 100 to 400-, 100 to 300-, 100 to 200-, 200 to 1000-, 200 to 900-, 200 to 800-, 200 to 700-, 200 to 600-, 200 to 500-, 200 to 400-, 200 to 300-, 300 to 1000-, 300 to 900-, 300 to 800-, 300 to 700-, 300 to 600-, 300 to 500-, 300 to 400-, 400 to 1000-, 400 to 900-, 400 to 800-, 400 to 700-, 400 to 600-, 400 to 500-, 500 to 1000-, 500 to 900-, 500 to 800-, 500 to 700-, 500 to 600-, 600 to 1000-, 600 to 900-, 600 to 800-, 600 to 700-, 700 to 1000-, 700 to 900-, 700 to 800-, 800 to 1000-, 800 to 900-, or 900 to 1000-fold reduction in the standard of care dose of a recombinant Ebola virus and/or Marburg virus protein vaccine. In some embodiments, such as the foregoing, the anti-Ebola virus and/or anti-Marburg virus antigenic polypeptide antibody titer produced in the subject is equivalent to an anti-Ebola virus and/or anti-Marburg virus antigenic polypeptide antibody titer produced in a control subject administered the standard of care dose of a recombinant or purified Ebola virus and/or Marburg virus protein vaccine or a live attenuated or inactivated Ebola virus and/or Marburg virus vaccine. In some embodiments, the effective amount is a dose equivalent to (or equivalent to an at least) 2-, 3-, 4-, 5-, 6-, 7-, 8-, 9-, 10-, 20-, 30-, 40-, 50-, 60-, 70-, 80-, 90-, 100-, 110-, 120-, 130-, 140-, 150-, 160-, 170-, 1280-, 190-, 200-, 210-, 220-, 230-, 240-, 250-, 260-, 270-, 280-, 290-, 300-, 310-, 320-, 330-, 340-, 350-, 360-, 370-, 380-, 390-, 400-, 410-, 420-, 430-, 440-, 450-, 4360-, 470-, 480-, 490-, 500-, 510-, 520-, 530-, 540-, 550-, 560-, 5760-, 580-, 590-, 600-, 610-, 620-, 630-, 640-, 650-, 660-, 670-, 680-, 690-, 700-, 710-, 720-, 730-, 740-, 750-, 760-, 770-, 780-, 790-, 800-, 810-, 820-, 830-, 840-, 850-, 860-, 870-, 880-, 890-, 900-, 910-, 920-, 930-, 940-, 950-, 960-, 970-, 980-, 990-, or 1000-fold reduction in the standard of care dose of a recombinant Ebola virus and/or Marburg virus protein vaccine. In some embodiments, such as the foregoing, an anti-Ebola virus and/or anti Marburg virus antigenic polypeptide antibody titer produced in the subject is equivalent to an anti-Ebola virus and/or anti-Marburg virus antigenic polypeptide antibody titer produced in a control subject administered the standard of care dose of a recombinant or purified Ebola virus and/or Marburg virus protein vaccine or a live attenuated or inactivated Ebola virus and/or Marburg virus vaccine.

[0406] In some embodiments, the effective amount of a Ebola virus and/or Marburg virus RNA (e.g., mRNA) vaccine is a total dose of 50-1000 μg. In some embodiments, the effective amount of a Ebola virus and/or Marburg virus RNA (e.g., mRNA) vaccine is a total dose of 50-1000, 50-900, 50-800, 50-700, 50-600, 50-500, 50-400, 50-300, 50-200, 50-100, 50-90, 50-80, 50-70, 50-60, 60-1000, 60-900, 60-800, 60-700, 60-600, 60-500, 60-400, 60-300, 60-200, 60-100, 60-90, 60-80, 60-70, 70-1000, 70-900, 70-800, 70-700, 70-600, 70-500, 70-400, 70-300, 70-200, 70-100, 70-90, 70-80, 80-1000, 80-900, 80-800, 80-700, 80-600, 80-500, 80-400, 80-300, 80-200, 80-100, 80-90, 90-1000, 90-900, 90-800, 90-700, 90-600, 90-500, 90-400, 90-300, 90-200, 90-100, 100-1000, 100-900, 100-800, 100-700, 100-600, 100-500, 100-400, 100-300, 100-200, 200-1000, 200-900, 200-800, 200-700, 200-600, 200-500, 200-400, 200-300, 300-1000, 300-900, 300-800, 300-700, 300-600, 300-500, 300-400, 400-1000, 400-900, 400-800, 400-700, 400-600, 400-500, 500-1000, 500-900, 500-800, 500-700, 500-600, 600-1000, 600-900, 600-900, 600-700, 700-1000, 700-900, 700-800, 800-1000, 800-900, or 900-1000 μg. In some embodiments, the effective amount of a Ebola virus and/or Marburg virus RNA (e.g., mRNA) vaccine is a total dose of 50, 100, 150, 200, 250, 300, 350, 400, 450, 500, 550, 600, 650, 700, 750, 800, 850, 900, 950 or 1000 μg. In some embodiments, the effective amount is a dose of 25-500 μg administered to the subject a total of two times. In some embodiments, the effective amount of a Ebola virus and/or Marburg virus RNA (e.g., mRNA) vaccine is a dose of 25-500, 25-400, 25-300, 25-200, 25-100, 25-50, 50-500, 50-400, 50-300, 50-200, 50-100, 100-500, 100-400, 100-300, 100-200, 150-500, 150-400, 150-300, 150-200, 200-500, 200-400, 200-300, 250-500, 250-400, 250-300, 300-500, 300-400, 350-500, 350-400, 400-500 or 450-500 μg administered to the subject a total of two times. In some embodiments, the effective amount of a Ebola virus and/or Marburg virus RNA (e.g., mRNA) vaccine is a total dose of 25, 50, 100, 150, 200, 250, 300, 350, 400, 450, or 500 μg administered to the subject a total of two times.

[0407] This invention is not limited in its application to the details of construction and the arrangement of components set forth in the following description or illustrated in the drawings. The invention is capable of other embodiments and of being practiced or of being carried out in various ways. Also, the phraseology and terminology used herein is for the purpose of description and should not be regarded as limiting. The use of “including,” “comprising,” or “having,” “containing,” “involving,” and variations thereof herein, is meant to encompass the items listed thereafter and equivalents thereof as well as additional items.

### EXAMPLES

### Example 1: Manufacture of Polynucleotides

[0408] According to the present disclosure, the manufacture of polynucleotides and or parts or regions thereof may be accomplished utilizing the methods taught in International Application WO2014/152027 entitled “Manufacturing Methods for Production of RNA Transcripts”, the contents of which is incorporated herein by reference in its entirety.

[0409] Purification methods may include those taught in International Application WO2014/152030 and WO2014/152031, each of which is incorporated herein by reference in its entirety.

[0410] Detection and characterization methods of the polynucleotides may be performed as taught in WO2014/144039, which is incorporated herein by reference in its entirety.

[0411] Characterization of the polynucleotides of the disclosure may be accomplished using a procedure selected from the group consisting of polynucleotide mapping, reverse transcriptase sequencing, charge distribution analysis, and detection of RNA impurities, wherein characterizing comprises determining the RNA transcript sequence, determining the purity of the RNA transcript, or determining the charge heterogeneity of the RNA transcript. Such methods are taught in, for example, WO2014/144711 and WO2014/144767, the contents of each of which is incorporated herein by reference in its entirety.

### Example 2: Chimeric Polynucleotide Synthesis

### Introduction

[0412] According to the present disclosure, two regions or parts of a chimeric polynucleotide may be joined or ligated using triphosphate chemistry.

[0413] According to this method, a first region or part of 100 nucleotides or less is chemically synthesized with a 5′ monophosphate and terminal 3′desOH or blocked OH. If the region is longer than 80 nucleotides, it may be synthesized as two strands for ligation.

[0414] If the first region or part is synthesized as a non-positionally modified region or part using in vitro transcription (IVT), conversion the 5′monophosphate with subsequent capping of the 3′ terminus may follow.

[0415] Monophosphate protecting groups may be selected from any of those known in the art.

[0416] The second region or part of the chimeric polynucleotide may be synthesized using either chemical synthesis or IVT methods. IVT methods may include an RNA polymerase that can utilize a primer with a modified cap. Alternatively, a cap of up to 130 nucleotides may be chemically synthesized and coupled to the IVT region or part.

[0417] It is noted that for ligation methods, ligation with DNA T4 ligase, followed by treatment with DNAse should readily avoid concatenation.

[0418] The entire chimeric polynucleotide need not be manufactured with a phosphate-sugar backbone. If one of the regions or parts encodes a polypeptide, then it is preferable that such region or part comprise a phosphate-sugar backbone.

[0419] Ligation is then performed using any known click chemistry, orthoclick chemistry, solulink, or other bioconjugate chemistries known to those in the art.

### Synthetic Route

[0420] The chimeric polynucleotide is made using a series of starting segments. Such segments include:

[0421] (a) Capped and protected 5′ segment comprising a normal 3′OH (SEG. 1)

[0422] (b) 5′ triphosphate segment which may include the coding region of a polypeptide and comprising a normal 3′OH (SEG. 2)

[0423] (c) 5′ monophosphate segment for the 3′ end of the chimeric polynucleotide (e.g., the tail) comprising cordycepin or no 3′OH (SEG. 3)

[0424] After synthesis (chemical or IVT), segment 3 (SEG. 3) is treated with cordycepin and then with pyrophosphatase to create the 5′monophosphate.

[0425] Segment 2 (SEG. 2) is then ligated to SEG. 3 using RNA ligase. The ligated polynucleotide is then purified and treated with pyrophosphatase to cleave the diphosphate. The treated SEG.2-SEG. 3 construct is then purified and SEG. 1 is ligated to the 5′ terminus. A further purification step of the chimeric polynucleotide may be performed.

[0426] Where the chimeric polynucleotide encodes a polypeptide, the ligated or joined segments may be represented as: 5′UTR (SEG. 1), open reading frame or ORF (SEG. 2) and 3′UTR+PolyA (SEG. 3).

[0427] The yields of each step may be as much as 90-95%.

### Example 3: PCR for cDNA Production

[0428] PCR procedures for the preparation of cDNA are performed using 2×KAPA HIFI™ HotStart ReadyMix by Kapa Biosystems (Woburn, Mass.). This system includes 2×KAPA ReadyMix12.5 μl; Forward Primer (10 μM) 0.75 μl; Reverse Primer (10 μM) 0.75 μl; Template cDNA −100 ng; and dH₂O diluted to 25.0 μl. The reaction conditions are at 95° C. for 5 min. and 25 cycles of 98° C. for 20 sec, then 58° C. for 15 sec, then 72° C. for 45 sec, then 72° C. for 5 min. then 4° C. to termination.

[0429] The reaction is cleaned up using Invitrogen's PURELINK™ PCR Micro Kit (Carlsbad, Calif.) per manufacturer's instructions (up to 5 μg). Larger reactions will require a cleanup using a product with a larger capacity. Following the cleanup, the cDNA is quantified using the NANODROP™ and analyzed by agarose gel electrophoresis to confirm the cDNA is the expected size. The cDNA is then submitted for sequencing analysis before proceeding to the in vitro transcription reaction.

### Example 4: In Vitro Transcription (IVT)

[0430] The in vitro transcription reaction generates polynucleotides containing uniformly modified polynucleotides. Such uniformly modified polynucleotides may comprise a region or part of the polynucleotides of the disclosure. The input nucleotide triphosphate (NTP) mix is made in-house using natural and un-natural NTPs.

[0431] A typical in vitro transcription reaction includes the following:

| | | | |
|---|---|---|---|
| 1 | Template cDNA | 1.0 | μg |
| 2 | 10x transcription buffer (400 mM Tris-HCl pH | 2.0 | μl |
| | 8.0, 190 mM MgCl₂, 50 mM DTT, 10 mM | | |
| | Spermidine) | | |
| 3 | Custom NTPs (25 mM each) | 7.2 | μl |
| 4 | RNase Inhibitor | 20 | U |
| 5 | T7 RNA polymerase | 3000 | U |

| | | |
|---|---|---|
| 6 | dH₂0 | Up to 20.0 μl. and |
| 7 | Incubation at 37° C. for 3 hr-5 hrs. | |

[0432] The crude IVT mix may be stored at 4° C. overnight for cleanup the next day. 1 U of RNase-free DNase is then used to digest the original template. After 15 minutes of incubation at 37° C., the mRNA is purified using Ambion's MEGACLEAR™ Kit (Austin, Tex.) following the manufacturer's instructions. This kit can purify up to 500 μg of RNA. Following the cleanup, the RNA is quantified using the NanoDrop and analyzed by agarose gel electrophoresis to confirm the RNA is the proper size and that no degradation of the RNA has occurred.

### Example 5: Enzymatic Capping

[0433] Capping of a polynucleotide is performed as follows where the mixture includes: IVT RNA 60 μg-180 μg and dH₂O up to 72 μl. The mixture is incubated at 65° C. for 5 minutes to denature RNA, and then is transferred immediately to ice.

[0434] The protocol then involves the mixing of 10× Capping Buffer (0.5 M Tris-HCl (pH 8.0), 60 mM KCl, 12.5 mM MgCl₂) (10.0 μl); 20 mM GTP (5.0 μl); 20 mM S-Adenosyl Methionine (2.5 μl); RNase Inhibitor (100 U); 2′-O-Methyltransferase (400U); Vaccinia capping enzyme (Guanylyl transferase) (40 U); dH₂O (Up to 28 μl); and incubation at 37° C. for 30 minutes for 60 μg RNA or up to 2 hours for 180 μg of RNA.

[0435] The polynucleotide is then purified using Ambion's MEGACLEAR™ Kit (Austin, Tex.) following the manufacturer's instructions. Following the cleanup, the RNA is quantified using the NANODROP™ (ThermoFisher, Waltham, Mass.) and analyzed by agarose gel electrophoresis to confirm the RNA is the proper size and that no degradation of the RNA has occurred. The RNA product may also be sequenced by running a reverse-transcription-PCR to generate the cDNA for sequencing.

### Example 6: PolyA Tailing Reaction

[0436] Without a poly-T in the cDNA, a poly-A tailing reaction must be performed before cleaning the final product. This is done by mixing Capped IVT RNA (100 μl); RNase Inhibitor (20 U); 10× Tailing Buffer (0.5 M Tris-HCl (pH 8.0), 2.5 M NaCl, 100 mM MgCl₂)(12.0 μl); 20 mM ATP (6.0 μl); Poly-A Polymerase (20 U); dH₂O up to 123.5 μl and incubation at 37° C. for 30 min. If the poly-A tail is already in the transcript, then the tailing reaction may be skipped and proceed directly to cleanup with Ambion's MEGACLEAR™ kit (Austin, Tex.) (up to 500 μg). Poly-A Polymerase is preferably a recombinant enzyme expressed in yeast.

[0437] It should be understood that the processivity or integrity of the polyA tailing reaction may not always result in an exact size polyA tail. Hence polyA tails of approximately between 40-200 nucleotides, e.g., about 40, 50, 60, 70, 80, 90, 91, 92, 93, 94, 95, 96, 97, 98, 99, 100, 101, 102, 103, 104, 105, 106, 107, 108, 109, 110, 150-165, 155, 156, 157, 158, 159, 160, 161, 162, 163, 164 or 165 are within the scope of the invention.

### Example 7: Natural 5′ Caps and 5′ Cap Analogues

[0438] 5′-capping of polynucleotides may be completed concomitantly during the in vitro-transcription reaction using the following chemical RNA cap analogs to generate the 5′-guanosine cap structure according to manufacturer protocols: 3′-O-Me-m7G(5′)ppp(5′) G [the ARCA cap];G(5′)ppp(5′)A; G(5′)ppp(5′)G; m7G(5′)ppp(5′)A; m7G(5′)ppp(5′)G (New England BioLabs, Ipswich, Mass.). 5′-capping of modified RNA may be completed post-transcriptionally using a Vaccinia Virus Capping Enzyme to generate the “Cap 0” structure: m7G(5′)ppp(5′)G (New England BioLabs, Ipswich, Mass.). Cap 1 structure may be generated using both Vaccinia Virus Capping Enzyme and a 2′-O methyl-transferase to generate: m7G(5′)ppp(5′)G-2′-O-methyl. Cap 2 structure may be generated from the Cap 1 structure followed by the 2′-O-methylation of the 5′-antepenultimate nucleotide using a 2′-O methyl-transferase. Cap 3 structure may be generated from the Cap 2 structure followed by the 2′-O-methylation of the 5′-preantepenultimate nucleotide using a 2′-O methyl-transferase. Enzymes are preferably derived from a recombinant source.

[0439] When transfected into mammalian cells, the modified mRNAs have a stability of between 12-18 hours or more than 18 hours, e.g., 24, 36, 48, 60, 72 or greater than 72 hours.

### Example 8: Capping Assays

[0440] A. Protein Expression Assay

[0441] Polynucleotides encoding a polypeptide, containing any of the caps taught herein can be transfected into cells at equal concentrations. 6, 12, 24 and 36 hours post-transfection the amount of protein secreted into the culture medium can be assayed by ELISA. Synthetic polynucleotides that secrete higher levels of protein into the medium would correspond to a synthetic polynucleotide with a higher translationally-competent Cap structure.

[0442] B. Purity Analysis Synthesis

[0443] Polynucleotides encoding a polypeptide, containing any of the caps taught herein can be compared for purity using denaturing Agarose-Urea gel electrophoresis or HPLC analysis.

[0444] Polynucleotides with a single, consolidated band by electrophoresis correspond to the higher purity product compared to polynucleotides with multiple bands or streaking bands. Synthetic polynucleotides with a single HPLC peak would also correspond to a higher purity product. The capping reaction with a higher efficiency would provide a more pure polynucleotide population.

[0445] C. Cytokine Analysis

[0446] Polynucleotides encoding a polypeptide, containing any of the caps taught herein can be transfected into cells at multiple concentrations. 6, 12, 24 and 36 hours post-transfection the amount of pro-inflammatory cytokines such as TNF-alpha and IFN-beta secreted into the culture medium can be assayed by ELISA. Polynucleotides resulting in the secretion of higher levels of pro-inflammatory cytokines into the medium would correspond to a polynucleotides containing an immune-activating cap structure.

[0447] D. Capping Reaction Efficiency

[0448] Polynucleotides encoding a polypeptide, containing any of the caps taught herein can be analyzed for capping reaction efficiency by LC-MS after nuclease treatment. Nuclease treatment of capped polynucleotides would yield a mixture of free nucleotides and the capped 5′-5-triphosphate cap structure detectable by LC-MS. The amount of capped product on the LC-MS spectra can be expressed as a percent of total polynucleotide from the reaction and would correspond to capping reaction efficiency. The cap structure with higher capping reaction efficiency would have a higher amount of capped product by LC-MS.

### Example 9: Agarose Gel Electrophoresis of Modified RNA or RT PCR Products

[0449] Individual polynucleotides (200-400 ng in a 20 μl volume) or reverse transcribed PCR products (200-400 ng) are loaded into a well on a non-denaturing 1.2% Agarose E-Gel (Invitrogen, Carlsbad, Calif.) and run for 12-15 minutes according to the manufacturer protocol.

### Example 10: Nanodrop Modified RNA Quantification and UV Spectral Data

[0450] Modified polynucleotides in TE buffer (1 μl) are used for Nanodrop UV absorbance readings to quantitate the yield of each polynucleotide from a chemical synthesis or in vitro transcription reaction.

### Example 11: Formulation of Modified mRNA Using Lipidoids

[0451] Polynucleotides are formulated for in vitro experiments by mixing the polynucleotides with the lipidoid at a set ratio prior to addition to cells. In vivo formulation may require the addition of extra ingredients to facilitate circulation throughout the body. To test the ability of these lipidoids to form particles suitable for in vivo work, a standard formulation process used for siRNA-lipidoid formulations may used as a starting point. After formation of the particle, polynucleotide is added and allowed to integrate with the complex. The encapsulation efficiency is determined using a standard dye exclusion assays.

### Example 12: Evaluation of Immunogenicity of Ebola GP Antigens

### Introduction

[0452] The Ebola glycoprotein (GP) is the only virally expressed protein on the virion surface, where it is essential for the attachment to host cells and catalyzes membrane fusion. Therefore, the Ebola GP is a critical component of vaccines, as well as a target of neutralizing antibodies and inhibitors of attachment and fusion. Pre-GP is cleaved by furin at a multi-basic motif into two subunits, GP1 and GP2, which remain associated through a disulfide linkage between Cys53 of GP1 and Cys609 of GP2. The heterodimer (GP1 and GP2) then assembles into a 450-kDa trimer (3 GP1 and 3 GP2) at the surface of nascent virions, where it exerts its functions. The structure of Ebola GP and antigen constructs tested herein are shown in FIG. 1 and Table 1.

[0453] Briefly, “Matured” EBOV GP has been engineered to include a human signal peptide. “Secreted” EBOV GP has been engineered to remove the transmembrane domain, i.e., residues 651-676 as depicted in the schematic. The “peptide scaffold” is as described in Schroder et al 2008. This short peptide sequence is described in the art as being capable of facilitating nanostructure formation. In preliminary experiments, the scaffold did not enhance antigenicity in the constructs tested. Without being bound in theory, it is believed that the scaffold peptide is not able to facilitate nanostructure formation under the physiologic conditions exemplified.

TABLE 1
Ebola glycoprotein constructs

| Antigen | Description | Cellular localization |
|---|---|---|
| Wildtype GP pro- | Canonical Ebola Zaire AA sequence of pro-polypeptide | Surface, membrane |
| polypeptide (surface form) | of GP, which is then processed post translationally. | bound |
| Wildtype GP pro- | Canonical Ebola Zaire AA sequence of pro-polypeptide | Surface, membrane |
| polypeptide (surface form, | of GP, which is then processed post translationally, with | bound |
| v5 tagged) | a V5 tag | |
| Matured GP polypeptide | Containing the AA sequence of the post-translationally | Surface, membrane |
| (Surface form) | processed GP. | bound |
| Matured GP polypeptide | Containing the AA sequence of the post-translationally | Surface, membrane |
| (Surface form, v5 tagged) | processed GP, with a V5 tag | bound |
| Wildtype GP pro- | Canonical Ebola Zaire AA sequence of pro-polypeptide | Secreted |
| polypeptide (secreted | of GP without the transmembrane domain, which is then | |
| form) | processed post translationally, | |
| Matured GP polypeptide | Containing the AA sequence of the post-translationally | secreted |
| (secreted form) | processed GP, minus the transmembrane domain | |
| Matured GP polypeptide | Containing the AA sequence of the post-translationally | secreted |
| in scaffold (secreted form) | processed GP, minus the transmembrane domain, with a | |
| | self-assembly peptidic scaffold | |

### Immunogenicity Evaluation: Study Design

[0454] In order to evaluate the antigenicity of seven Ebola antigen constructs, the following protocol was developed. As shown in FIG. 2, the mice were vaccinated with MC3-formulated, mRNA-encoded Ebola GP on days 0 (primary) and 14 (first booster). The doses were 0.4 mg/kg. Samples were collected on days 0, 10, 21, 33, 52, and 77. Mice were euthanized on Day 77. Recombinant EBOV GP and PBS were used as the positive and negative experimental controls, respectively.

### Results

[0455] The initial anti-Ebola GP response at Day 10 after a single primary challenge was generally within the range of 1U/mL of anti-Ebola GP mouse antibody, as measured by ELISA (FIG. 3). Serum samples were diluted 1:100 for the assay. For the positive control, the colored bars represent the units depicted. For the various constructs tested, the colored bars represent antibody titers for individual mice tested. As compared to PBS control, essentially all constructs had detectable antibody titers at 10 days following immunization.

[0456] The anti-Ebola GP antibody titer of selected antigens on Day 21 and Day 23 was also examined (n=3 per group) (FIG. 4).

[0457] The antibody response to the Ebola GP antigen at Day 21 post-vaccination was also quantified in each group (FIG. 5). For the positive control, the colored bars represent the units depicted. For the various constructs tested, the colored bars represent antibody titers for individual mice tested. As compared to PBS control, essentially all constructs had significant antibody titers at 10 days following immunization.

[0458] The in vitro neutralization activity of serum samples in the DeltaVp30 Ebola virus system has been examined (Halfman et al., PNAS 105:1129) (FIG. 6). Naïve mouse serum was found to have blocking activity in the assay, which was particularly evident at the 1:20 dilution and is believed to have masked the potential specific neutralizing activity of serum samples from animals at higher concentrations. The 1:980 dilution was found to be the best with respect to the evaluating the virus neutralizing capability of the samples. The background at this dilution was typically less than 10% on the Day 0 time point.

### Example 13: In Vivo Vaccination of Guinea Pigs

### Introduction

[0459] Guinea Pigs were vaccinated with Ebola GP (either pre-protein GP or mature GP) according to the vaccination schedule shown in FIG. 7 and Table 2.

TABLE 2

| | N | | | |
|---|---|---|---|---|
| Group | animals | Vaccine | Dose | Route |
| A | 5 | EBOV GP (pre-protein) | 20 ug/100 ul | IM |
| | | membrane | | |
| B | 5 | EBOV mature GP (IgK - | 20 ug/100 ul | IM |
| | | membrane bound) | | |
| C | 5 | PBS | 100 ul | IM |

[0460] The guinea pigs were primed with 20 ug of vaccine on day 0 and boosted with 20 ug of vaccine on day 21 (both IM). Animals were challenged with 1,000 pfu of guinea pig-adapted Ebola virus on day 42. Blood was collected on days 42, 45, 48, 51, 54, 63, and 70, followed by euthanization of the animals on day 70. Two mRNA vaccine constructs were tested (EH_EBLA.matGP.IgKsp(mem) SEQ ID NO. 17 and EH_EBLA.wtGP(mem) SEQ ID NO. 21) and a control unvaccinated group received PBS. Dosing is IM and there are 2 doses/animal (2 and 10 ug). The mRNA vaccines include pseudo uridine modifications.

[0461] Quite surprisingly, vaccination with the mRNA vaccine conferred 100% protection against 10E3 PFUs of gp-adapted Ebola (Zaire species, Mayinga strain). Untreated animals succumbed to the infection completely by day 10 post infection. The data is shown in FIG. 8.

### Example 14: In Vivo Immunogenicity of BALB/c Mice

[0462] Marburg glycoprotein mRNA vaccines were generated using three distinct Marburg strains based on glycoprotein sequence conservation: Musoke, Uganda, and RAVN. The mRNA constructs were tested for in vitro expression by transfection in mammalian cells and protein detection using Western blot (data not shown).

[0463] To test in vivo immunogenicity, BALB/c mice were administered 10 μg of the vaccine on day 0 and day 28. Neutralizing titers to their homologous strains were measured on day 56. As shown in FIG. 9, all mRNA glycoprotein vaccines tested in this study were found to be immunogenic with high levels of neutralizing titers against their specific strains including Uganda (group 8), Ravin (group 9), and Musoke (group 10).

### Sequences

[0464] The following are Ebola nucleic acid sequences (Table 4) for the open reading frames of the RNA polynucleotides (Table 6) or for the RNA polynucleotides and amino acid (Table 5) sequences for each of the exemplary constructs. Tables 7 and 8 provide the DNA and RNA sequences of the full constructs, respectively. With respect to the Marburg virus sequences, Table 10 provides amino acid the amino acid sequences, first with the signal sequence and then without the signal sequence, Table 11 provides DNA sequences, and Table 12 shows the RNA polynucleotides.

[0465] It should be understood that any of the mRNA sequences described herein may include a 5′ UTR and/or a 3′ UTR. The UTR sequences may be selected from the following sequences, or other known UTR sequences may be used. It should also be understood that any of the mRNA constructs described herein may further comprise a polyA tail and/or cap (e.g., 7mG(5′)ppp(5′)NlmpNp). Further, while many of the mRNAs and encoded antigen sequences described herein include a signal peptide and/or a peptide tag (e.g., C-terminal His tag), it should be understood that the indicated signal peptide and/or peptide tag may be substituted for a different signal peptide and/or peptide tag, or the signal peptide and/or peptide tag may be omitted.

DNA
5′ UTR:
(SEQ ID NO: 142)
tcaagctttt ggaccctcgt acagaagcta atacgactca
ctatagggaa ataagagaga aaagaagagt aagaagaaat
ataagagcca cc
5′ UTR:
(SEQ ID NO: 144)
gggaaataag agagaaaaga agagtaagaa gaaatataag
accccggcgc cgccacc
3′ UTR:
(SEQ ID NO: 143)
tgataatagg ctggagcctc ggtggccatg cttcttgccc
cttgggcctc cccccagccc ctcctcccct tcctgcaccc
gtacccccgt ggtctttgaa taaagtctga gtgggcggc
RNA
5′ UTR:
(SEQ ID NO: 163)
ucaagcuuuu ggacccucgu acagaagcua auacgacuca
cuauagggaa auaagagaga aaagaagagu aagaagaaau
auaagagcca cc
5′ UTR:
(SEQ ID NO: 165)
gggaaauaag agagaaaaga agaguaagaa gaaauauaag
accccggcgc cgccacc
3′ UTR:
(SEQ ID NO: 164)
ugauaauagg cuggagccuc gguggccaug cuucuugccc
cuugggccuc cccccagccc cuccuccccu uccugcaccc
guacccccgu ggucuuugaa uaaagucuga gugggcggc

[0466] Each of the sequences described herein encompasses a chemically modified sequence (one or more nucleotides are modified) or an unmodified sequence which includes no nucleotide modifications.

TABLE 3

| | Nucleic | Amino | Nucleic |
|---|---|---|---|
| | Acid | Acid | Acid poly- |
| | ORF | ORF | nucleotide |
| | SEQ ID | SEQ ID | SEQ ID |
| mRNA Name(s) | NO | NO | NO |
| EBLA.matureGP.IgKsp(surface) | 1 | 9 | 17 |
| EBLA.matureGP.IgKsp(surface).v5 | 2 | 10 | 18 |
| EBLA.matureGP.IgKsp(Secreted) | 3 | 11 | 19 |
| EBLA.matureGP.IgKsp(Secreted).v5 | 4 | 12 | 20 |
| EBLA.wtGP(surface) | 5 | 13 | 21 |
| EBLA.wtGP(surface).v5 | 6 | 14 | 22 |
| EBLA.wtGP(secreted) | 7 | 15 | 23 |
| EBLA.wtGP(secreted).v5 | 8 | 16 | 24 |
| EBLA.wtNP | 25 | 26 | 27 |
| GP12_SUDN_609_2012 | 45 | 46/47 | |
| GP12_ZEBOV_GBR_15 | 49 | 50/51 | |
| GP12_Bundi_112_2012 | 53 | 54/55 | |

TABLE 4
EBOV DNA ORF Sequences

| SEQ | |
|---|---|
| ID | |
| NO. | Description |
| 1 | EBLA.matureGP.IgKsp(surface) |
| 2 | EBLA.matureGP.IgKsp(surface).v5 |
| 3 | EBLA.matureGP.IgKsp(Secreted) |
| 4 | EBLA.wtGP(surface) |
| 5 | EBLA.wtGP(surface).v5 |
| 6 | EBLA.wtGP(secreted) |
| 7 | EBLA.wtGP(secreted).v5 |
| 8 | EBLA.wtNP |
| 25 | GP12_SUDN_609_2012 |
| 45 | GP12_ZEBOV_GBR_15 |
| 49 | GP12_Bundi_112_2012 |
| 53 | EBLA.wtGP(surface) |

TABLE 5
EBOV Protein Sequences

| SEQ | |
|---|---|
| ID | |
| NO. | Description |
| 9 | EBLA.matureGP.IgKsp(surface) |
| 10 | EBLA.matureGP.IgKsp(surface).v5 |
| 11 | EBLA.matureGP.IgKsp(Secreted) |
| 12 | EBLA.wtGP(surface) |
| 13 | EBLA.wtGP(surface).v5 |
| 14 | EBLA.wtGP(secreted) |
| 15 | EBLA.wtGP(secreted).v5 |
| 16 | EBLA.wtNP |
| 26 | GP12_SUDN_609_2012 |
| 46/47 | GP12_ZEBOV_GBR_15 |
| 50/51 | GP12_Bundi_112_2012 |
| 54/55 | EBLA.wtGP(surface) |

TABLE 6
EBOV RNA ORF Sequences

| SEQ | |
|---|---|
| ID | |
| NO. | Description |
| 28 | EBLA.matureGP.IgKsp(surface) |
| 29 | EBLA.matureGP.IgKsp(surface).v5 |
| 30 | EBLA.matureGP.IgKsp(Secreted) |
| 31 | EBLA.wtGP(surface) |
| 32 | EBLA.wtGP(surface).v5 |
| 33 | EBLA.wtGP(secreted) |
| 34 | EBLA.wtGP(secreted).v5 |
| 35 | EBLA.wtNP |
| 141 | GP12_SUDN_609_2012 |
| 48 | GP12_ZEBOV_GBR_15 |
| 52 | GP12_Bundi_112_2012 |
| 56 | EBLA.wtGP(surface) |

TABLE 7
EBOV DNA Constructs (Full Sequences)

| | | 5′ | | 3′ |
|---|---|---|---|---|
| SEQ | | UTR | ORF | UTR |
| ID | | (SEQ | (SEQ | (SEQ |
| NO. | Description | ID NO.) | ID NO.) | ID NO.) |
| 17 | EBLA.matureGP.IgKsp(surface) | 142 | 1 | 143 |
| 18 | EBLA.matureGP.IgKsp(surface).v5 | 142 | 2 | 143 |
| 19 | EBLA.matureGP.IgKsp(Secreted) | 142 | 3 | 143 |
| 20 | EBLA.wtGP(surface) | 142 | 4 | 143 |
| 21 | EBLA.wtGP(surface).v5 | 142 | 5 | 143 |
| 22 | EBLA.wtGP(secreted) | 142 | 6 | 143 |
| 23 | EBLA.wtGP(secreted).v5 | 142 | 7 | 143 |
| 24 | EBLA.wtNP | 142 | 8 | 143 |
| 27 | GP12_SUDN_609_2012 | 142 | 25 | 143 |
| 145 | EBLA.matureGP.IgKsp(surface) | 144 | 1 | 143 |
| 146 | EBLA.matureGP.IgKsp(surface).v5 | 144 | 2 | 143 |
| 147 | EBLA.matureGP.IgKsp(Secreted) | 144 | 3 | 143 |
| 148 | EBLA.wtGP(surface) | 144 | 4 | 143 |
| 149 | EBLA.wtGP(surface).v5 | 144 | 5 | 143 |
| 150 | EBLA.wtGP(secreted) | 144 | 6 | 143 |
| 151 | EBLA.wtGP(secreted).v5 | 144 | 7 | 143 |
| 152 | EBLA.wtNP | 144 | 8 | 143 |
| 153 | GP12_SUDN_609_2012 | 144 | 25 | 143 |

TABLE 8
EBOV RNA Constructs (Full Sequences)

| | | 5′ | | 3′ |
|---|---|---|---|---|
| SEQ | | UTR | ORF | UTR |
| ID | | (SEQ | (SEQ | (SEQ |
| NO. | Description | ID NO.) | ID NO.) | ID NO.) |
| 36 | EBLA.matureGP.IgKsp(surface) | 163 | 28 | 164 |
| 37 | EBLA.matureGP.IgKsp(surface).v5 | 163 | 29 | 164 |
| 38 | EBLA.matureGP.IgKsp(Secreted) | 163 | 30 | 164 |
| 39 | EBLA.wtGP(surface) | 163 | 31 | 164 |
| 40 | EBLA.wtGP(surface).v5 | 163 | 32 | 164 |
| 41 | EBLA.wtGP(secreted) | 163 | 33 | 164 |
| 42 | EBLA.wtGP(secreted).v5 | 163 | 34 | 164 |
| 43 | EBLA.wtNP | 163 | 35 | 164 |
| 44 | GP12_SUDN_609_2012 | 163 | 141 | 164 |
| 154 | EBLA.matureGP.IgKsp(surface) | 165 | 28 | 164 |
| 155 | EBLA.matureGP.IgKsp(surface).v5 | 165 | 29 | 164 |
| 156 | EBLA.matureGP.IgKsp(Secreted) | 165 | 30 | 164 |
| 157 | EBLA.wtGP(surface) | 165 | 31 | 164 |
| 158 | EBLA.wtGP(surface).v5 | 165 | 32 | 164 |
| 159 | EBLA.wtGP(secreted) | 165 | 33 | 164 |
| 160 | EBLA.wtGP(secreted).v5 | 165 | 34 | 164 |
| 161 | EBLA.wtNP | 165 | 35 | 164 |
| 162 | GP12_SUDN_609_2012 | 165 | 141 | 164 |

TABLE 9
Full-length Ebola GP-Small Amino Acid Sequences (Homo sapiens strains)

| GenBank | | Collection | Release | |
|---|---|---|---|---|
| Accession | Country | Date | Date | Virus Name |
| ACI28623 | Uganda | 2007 November | Nov. 21, 2008 | Bundibugyo ebolavirus, complete genome |
| ACI28633 | Cote | 1994 November | Nov. 21, 2008 | Cote d″Ivoire ebolavirus, complete genome |
| | d'Ivoire | | | |
| AFP28230 | Uganda | 2011 May | Aug. 6, 2012 | Sudan ebolavirus - Nakisamata, complete genome |
| ABY75324 | Sudan | 2004 | Jan. 23, 2008 | Sudan ebolavirus isolate EBOV-S-2004 from |
| | | | | Sudan, complete genome |
| AGB56679 | Sudan | 1979 | Jan. 7, 2013 | Sudan ebolavirus isolate SUDV/H.sapiens- |
| | | | | tc/SSD/1979/Maleo, complete genome |
| AER59711 | Democratic | Dec. 31, 2008 | Nov. 7, 2011 | Zaire ebolavirus isolate 034-KS, partial genome |
| | Republic of | | | |
| | the Congo | | | |
| AKU75160 | Sierra | Feb. 19, 2015 | Aug. 11, 2015 | Zaire ebolavirus isolate |
| | Leone | | | EBOV/DML12033/SLe/WesternUrban/20150219, |
| | | | | complete genome |
| AKU75169 | Sierra | Feb. 21, 2015 | Aug. 11, 2015 | Zaire ebolavirus isolate |
| | Leone | | | EBOV/DML12051/SLe/WesternUrban/20150221, |
| | | | | complete genome |
| AKU75178 | Sierra | Feb. 26, 2015 | Aug. 11, 2015 | Zaire ebolavirus isolate |
| | Leone | | | EBOV/DML12116/SLe/WesternUrban/20150226, |
| | | | | complete genome |
| AKU75187 | Sierra | Feb. 26, 2015 | Aug. 11, 2015 | Zaire ebolavirus isolate |
| | Leone | | | EBOV/DML12117/SLe/WesternUrban/20150226, |
| | | | | complete genome |
| AKU75196 | Sierra | Feb. 27, 2015 | Aug. 11, 2015 | Zaire ebolavirus isolate |
| | Leone | | | EBOV/DML12120/SLe/WesternUrban/20150227, |
| | | | | complete genome |
| AKU75214 | Sierra | Feb. 28, 2015 | Aug. 11, 2015 | Zaire ebolavirus isolate |
| | Leone | | | EBOV/DML12137/SLe/WesternUrban/20150228, |
| | | | | complete genome |
| AKU75205 | Sierra | Mar. 4, 2015 | Aug. 11, 2015 | Zaire ebolavirus isolate |
| | Leone | | | EBOV/DML12194/SLe/WesternUrban/20150304, |
| | | | | complete genome |
| AKU75223 | Sierra | Mar. 7, 2015 | Aug. 11, 2015 | Zaire ebolavirus isolate |
| | Leone | | | EBOV/DML12239/SLe/WesternUrban/20150309, |
| | | | | complete genome |
| AKU75232 | Sierra | Mar. 9, 2015 | Aug. 11, 2015 | Zaire ebolavirus isolate |
| | Leone | | | EBOV/DML12260/SLe/WesternUrban/20150309, |
| | | | | complete genome |
| AKU75241 | Sierra | Mar. 10, 2015 | Aug. 11, 2015 | Zaire ebolavirus isolate |
| | Leone | | | EBOV/DML12268/SLe/WesternUrban/20150310, |
| | | | | complete genome |
| AKU75250 | Sierra | Mar. 28, 2015 | Aug. 11, 2015 | Zaire ebolavirus isolate |
| | Leone | | | EBOV/DML12458/SLe/WesternUrban/20150328, |
| | | | | complete genome |
| AKU75259 | Sierra | Mar. 31, 2015 | Aug. 11, 2015 | Zaire ebolavirus isolate |
| | Leone | | | EBOV/DML12485/SLe/WesternUrban/20150331, |
| | | | | partial genome |
| AKU75583 | Sierra | Jun. 30, 2015 | Aug. 11, 2015 | Zaire ebolavirus isolate |
| | Leone | | | EBOV/DML14077/SLe/WesternUrban/20150630, |
| | | | | complete genome |
| AKU75565 | Sierra | Jul. 3, 2015 | Aug. 11, 2015 | Zaire ebolavirus isolate |
| | Leone | | | EBOV/DML14163/SLe/WesternUrban/20150703, |
| | | | | complete genome |
| AKU75574 | Sierra | Jul. 11, 2015 | Aug. 11, 2015 | Zaire ebolavirus isolate |
| | Leone | | | EBOV/DML14366/SLe/WesternUrban/20150711, |
| | | | | complete genome |
| AKU75268 | Sierra | Jan. 13, 2015 | Aug. 11, 2015 | Zaire ebolavirus isolate |
| | Leone | | | EBOV/DML24502/SLe/Kono/20150113, partial |
| | | | | genome |
| AKU75277 | Sierra | Jan. 13, 2015 | Aug. 11, 2015 | Zaire ebolavirus isolate |
| | Leone | | | EBOV/DML24504/SLe/Kono/20150113, |
| | | | | complete genome |
| AKU75286 | Sierra | Jan. 14, 2015 | Aug. 11, 2015 | Zaire ebolavirus isolate |
| | Leone | | | EBOV/DML24506/SLe/Kono/20150114, |
| | | | | complete genome |
| AKU75295 | Sierra | Jan. 14, 2015 | Aug. 11, 2015 | Zaire ebolavirus isolate |
| | Leone | | | EBOV/DML24511/SLe/Kono/20150114, |
| | | | | complete genome |
| AKU75304 | Sierra | Jan. 17, 2015 | Aug. 11, 2015 | Zaire ebolavirus isolate |
| | Leone | | | EBOV/DML24552/SLe/Kono/20150117, |
| | | | | complete genome |
| AKU75313 | Sierra | Jan. 17, 2015 | Aug. 11, 2015 | Zaire ebolavirus isolate |
| | Leone | | | EBOV/DML24553/SLe/Kono/20150117, |
| | | | | complete genome |
| AKU75326 | Sierra | Jan. 18, 2015 | Aug. 11, 2015 | Zaire ebolavirus isolate |
| | Leone | | | EBOV/DML24573/SLe/Kono/20150118, |
| | | | | complete genome |
| AKU75331 | Sierra | Jan. 19, 2015 | Aug. 11, 2015 | Zaire ebolavirus isolate |
| | Leone | | | EBOV/DML24581/SLe/Kono/20150119, |
| | | | | complete genome |
| AKU75340 | Sierra | Jan. 20, 2015 | Aug. 11, 2015 | Zaire ebolavirus isolate |
| | Leone | | | EBOV/DML24592/SLe/Kono/20150120, |
| | | | | complete genome |
| AKU75351 | Sierra | Jan. 20, 2015 | Aug. 11, 2015 | Zaire ebolavirus isolate |
| | Leone | | | EBOV/DML24601/SLe/Kono/20150120, |
| | | | | complete genome |
| AKU75358 | Sierra | Jan. 20, 2015 | Aug. 11, 2015 | Zaire ebolavirus isolate |
| | Leone | | | EBOV/DML24604/SLe/Kono/20150120, |
| | | | | complete genome |
| AKU75367 | Sierra | Jan. 20, 2015 | Aug. 11, 2015 | Zaire ebolavirus isolate |
| | Leone | | | EBOV/DML24605/SLe/Kono/20150120, |
| | | | | complete genome |
| AKU75376 | Sierra | Jan. 20, 2015 | Aug. 11, 2015 | Zaire ebolavirus isolate |
| | Leone | | | EBOV/DML24606/SLe/Kono/20150120, |
| | | | | complete genome |
| AKU75385 | Sierra | Jan. 20, 2015 | Aug. 11, 2015 | Zaire ebolavirus isolate |
| | Leone | | | EBOV/DML24608/SLe/Kono/20150120, |
| | | | | complete genome |
| AKU75394 | Sierra | Jan. 21, 2015 | Aug. 11, 2015 | Zaire ebolavirus isolate |
| | Leone | | | EBOV/DML24611/SLe/Kono/20150121, |
| | | | | complete genome |
| AKU75403 | Sierra | Jan. 21, 2015 | Aug. 11, 2015 | Zaire ebolavirus isolate |
| | Leone | | | EBOV/DML24620/SLe/Kono/20150121, partial |
| | | | | genome |
| AKU75412 | Sierra | Jan. 25, 2015 | Aug. 11, 2015 | Zaire ebolavirus isolate |
| | Leone | | | EBOV/DML24669/SLe/Kono/20150125, |
| | | | | complete genome |
| AKU75421 | Sierra | Jan. 25, 2015 | Aug. 11, 2015 | Zaire ebolavirus isolate |
| | Leone | | | EBOV/DML24677/SLe/Kono/20150125, |
| | | | | complete genome |
| AKU75430 | Sierra | Jan. 26, 2015 | Aug. 11, 2015 | Zaire ebolavirus isolate |
| | Leone | | | EBOV/DML24683/SLe/Kono/20150126, |
| | | | | complete genome |
| AKU75439 | Sierra | Jan. 28, 2015 | Aug. 11, 2015 | Zaire ebolavirus isolate |
| | Leone | | | EBOV/DML24706/SLe/Kono/20150128, |
| | | | | complete genome |
| AKU75448 | Sierra | Jan. 28, 2015 | Aug. 11, 2015 | Zaire ebolavirus isolate |
| | Leone | | | EBOV/DML24708/SLe/Kono/20150128, |
| | | | | complete genome |
| AKU75457 | Sierra | Jan. 29, 2015 | Aug. 11, 2015 | Zaire ebolavirus isolate |
| | Leone | | | EBOV/DML24720/SLe/Kono/20150129, |
| | | | | complete genome |
| AKU75466 | Sierra | Jan. 30, 2015 | Aug. 11, 2015 | Zaire ebolavirus isolate |
| | Leone | | | EBOV/DML24758/SLe/Kono/20150130, |
| | | | | complete genome |
| AKU75475 | Sierra | Feb. 3, 2015 | Aug. 11, 2015 | Zaire ebolavirus isolate |
| | Leone | | | EBOV/DML24818/SLe/Kono/20150203, |
| | | | | complete genome |
| AKU75484 | Sierra | Feb. 4, 2015 | Aug. 11, 2015 | Zaire ebolavirus isolate |
| | Leone | | | EBOV/DML24825/SLe/Tonkolili/20150204, |
| | | | | complete genome |
| AKU75493 | Sierra | Feb. 6, 2015 | Aug. 11, 2015 | Zaire ebolavirus isolate |
| | Leone | | | EBOV/DML24853/SLe/Kono/20150206, |
| | | | | complete genome |
| AKU75502 | Sierra | Feb. 6, 2015 | Aug. 11, 2015 | Zaire ebolavirus isolate |
| | Leone | | | EBOV/DML24854/SLe/Kono/20150206, |
| | | | | complete genome |
| AKU75511 | Sierra | Feb. 18, 2015 | Aug. 11, 2015 | Zaire ebolavirus isolate |
| | Leone | | | EBOV/DML25083/SLe/Kono/20150218, |
| | | | | complete genome |
| AKU75520 | Sierra | Feb. 19, 2015 | Aug. 11, 2015 | Zaire ebolavirus isolate |
| | Leone | | | EBOV/DML25103/SLe/Kono/20150219, |
| | | | | complete genome |
| AKU75529 | Sierra | Feb. 18, 2015 | Aug. 11, 2015 | Zaire ebolavirus isolate |
| | Leone | | | EBOV/DML25123/SLe/Kenema/20150218, |
| | | | | partial genome |
| AKU75538 | Sierra | Feb. 23, 2015 | Aug. 11, 2015 | Zaire ebolavirus isolate |
| | Leone | | | EBOV/DML25180/SLe/Kono/20150223, |
| | | | | complete genome |
| AKU75547 | Sierra | Mar. 6, 2015 | Aug. 11, 2015 | Zaire ebolavirus isolate |
| | Leone | | | EBOV/DML25344/SLe/Kono/20150306, |
| | | | | complete genome |
| AKU75556 | Sierra | Mar. 10, 2015 | Aug. 11, 2015 | Zaire ebolavirus isolate |
| | Leone | | | EBOV/DML25411/SLe/Kono/20150310, partial |
| | | | | genome |
| AGB56840 | Democratic | 1976 | Jan. 7, 2013 | Zaire ebolavirus isolate EBOV/H.sapiens- |
| | Republic of | | | tc/COD/1976/deRoover, complete genome |
| | the Congo | | | |
| AGB56750 | Democratic | 1977 | Jan. 7, 2013 | Zaire ebolavirus isolate EBOV/H.sapiens- |
| | Republic of | | | tc/COD/1977/Bonduni, complete genome |
| | the Congo | | | |
| AGB56795 | Democratic | 1995 | Jan. 7, 2013 | Zaire ebolavirus isolate EBOV/H.sapiens- |
| | Republic of | | | tc/COD/1995/13625 Kikwit, complete genome |
| | the Congo | | | |
| AGB56822 | Democratic | 1995 | Jan. 7, 2013 | Zaire ebolavirus isolate EBOV/H.sapiens- |
| | Republic of | | | tc/COD/1995/13709 Kikwit, complete genome |
| | the Congo | | | |
| AGB56696 | Democratic | 2007 | Jan. 7, 2013 | Zaire ebolavirus isolate EBOV/H.sapiens- |
| | Republic of | | | tc/COD/2007/0 Luebo, complete genome |
| | the Congo | | | |
| AGB56705 | Democratic | 2007 | Jan. 7, 2013 | Zaire ebolavirus isolate EBOV/H.sapiens- |
| | Republic of | | | tc/COD/2007/1 Luebo, complete genome |
| | the Congo | | | |
| AGB56714 | Democratic | 2007 | Jan. 7, 2013 | Zaire ebolavirus isolate EBOV/H.sapiens- |
| | Republic of | | | tc/COD/2007/23 Luebo, complete genome |
| | the Congo | | | |
| AGB56732 | Democratic | 2007 | Jan. 7, 2013 | Zaire ebolavirus isolate EBOV/H.sapiens- |
| | Republic of | | | tc/COD/2007/4 Luebo, complete genome |
| | the Congo | | | |
| AGB56723 | Democratic | 2007 | Jan. 7, 2013 | Zaire ebolavirus isolate EBOV/H.sapiens- |
| | Republic of | | | tc/COD/2007/43 Luebo, complete genome |
| | the Congo | | | |
| AGB56741 | Democratic | 2007 | Jan. 7, 2013 | Zaire ebolavirus isolate EBOV/H.sapiens- |
| | Republic of | | | tc/COD/2007/5 Luebo, complete genome |
| | the Congo | | | |
| AGB56687 | Democratic | 2007 | Jan. 7, 2013 | Zaire ebolavirus isolate EBOV/H.sapiens- |
| | Republic of | | | tc/COD/2007/9 Luebo, complete genome |
| | the Congo | | | |
| AGB56759 | Gabon | 1994 | Jan. 7, 2013 | Zaire ebolavirus isolate EBOV/H.sapiens- |
| | | | | tc/GAB/1994/Gabon, complete genome |
| AGB56768 | Gabon | 1996 | Jan. 7, 2013 | Zaire ebolavirus isolate EBOV/H.sapiens- |
| | | | | tc/GAB/1996/1Eko, complete genome |
| AGB56813 | Gabon | 1996 | Jan. 7, 2013 | Zaire ebolavirus isolate EBOV/H.sapiens- |
| | | | | tc/GAB/1996/1Ikot, complete genome |
| AGB56786 | Gabon | 1996 | Jan. 7, 2013 | Zaire ebolavirus isolate EBOV/H.sapiens- |
| | | | | tc/GAB/1996/1Mbie, complete genome |
| AGB56804 | Gabon | 1996 | Jan. 7, 2013 | Zaire ebolavirus isolate EBOV/H.sapiens- |
| | | | | tc/GAB/1996/1Oba, complete genome |
| AGB56777 | Gabon | 1996 | Jan. 7, 2013 | Zaire ebolavirus isolate EBOV/H.sapiens- |
| | | | | tc/GAB/1996/2Nza, complete genome |
| AGB56831 | Gabon | 2002 | Jan. 7, 2013 | Zaire ebolavirus isolate EBOV/H.sapiens- |
| | | | | tc/GAB/2002/Ilembe, complete genome |
| AKA59361 | United | Mar. 12, 2015 | Apr. 4, 2015 | Zaire ebolavirus isolate Ebola virus H.sapiens- |
| | Kingdom | | | wt/GBR/2015/Makona-UK3, complete genome |
| AKC01436 | Liberia | 2014 | Apr. 14, 2015 | Zaire ebolavirus isolate Ebola virus H.sapiens- |
| | | | | wt/LBR/2014/Makona-Liberia-DQE1, complete |
| | | | | genome |
| AKC01476 | Liberia | 2014 | Apr. 14, 2015 | Zaire ebolavirus isolate Ebola virus H.sapiens- |
| | | | | wt/LBR/2014/Makona-Liberia-DQE12, complete |
| | | | | genome |
| AKC01484 | Liberia | 2014 | Apr. 14, 2015 | Zaire ebolavirus isolate Ebola virus H.sapiens- |
| | | | | wt/LBR/2014/Makona-Liberia-DQE13, complete |
| | | | | genome |
| AKC01492 | Liberia | 2014 | Apr. 14, 2015 | Zaire ebolavirus isolate Ebola virus H.sapiens- |
| | | | | wt/LBR/2014/Makona-Liberia-DQE14, complete |
| | | | | genome |
| AKC01444 | Liberia | 2015 | Apr. 14, 2015 | Zaire ebolavirus isolate Ebola virus H.sapiens- |
| | | | | wt/LBR/2015/Makona-Liberia-DQE3, complete |
| | | | | genome |
| AKC01452 | Liberia | 2015 | Apr. 14, 2015 | Zaire ebolavirus isolate Ebola virus H.sapiens- |
| | | | | wt/LBR/2015/Makona-Liberia-DQE4, complete |
| | | | | genome |
| AKC01460 | Liberia | 2015 | Apr. 14, 2015 | Zaire ebolavirus isolate Ebola virus H.sapiens- |
| | | | | wt/LBR/2015/Makona-Liberia-DQE5, complete |
| | | | | genome |
| AKC01468 | Liberia | 2015 | Apr. 14, 2015 | Zaire ebolavirus isolate Ebola virus H.sapiens- |
| | | | | wt/LBR/2015/Makona-Liberia-DQE6, complete |
| | | | | genome |
| AKT08841 | Sierra | Feb. 19, 2015 | Aug. 4, 2015 | Zaire ebolavirus isolate Ebola virus H.sapiens- |
| | Leone | | | wt/SLE/2015/Makona-Goderich1, complete |
| | | | | genome |
| AIO11752 | Democratic | 2014 | Oct. 17, 2014 | Zaire ebolavirus isolate Ebola virus/H.sap- |
| | Republic of | | | wt/COD/2014/Boende-Lokolia, partial genome |
| | the Congo | | | |
| AIR94007 | Democratic | 1976 | Oct. 3, 2014 | Zaire ebolavirus isolate Ebola virus/H.sapiens- |
| | Republic of | | | tc/COD/1976/Yambuku-Ecran, complete genome |
| | the Congo | | | |
| AIY29183 | United | Aug. 25, 2014 | Nov. 26, 2014 | Zaire ebolavirus isolate Ebola virus/H.sapiens- |
| | Kingdom | | | tc/GBR/2014/Makona-UK1.1, complete genome |
| AJF38896 | Italy | Nov. 25, 2014 | Feb. 1, 2015 | Zaire ebolavirus isolate Ebola virus/H.sapiens- |
| | | | | tc/SLE/2014/Makona-Italy-INMI1, complete |
| | | | | genome |
| AJG44193 | Switzerland | Nov. 21, 2014 | Feb. 9, 2015 | Zaire ebolavirus isolate Ebola virus/H.sapiens- |
| | | | | wt/CHE/2014/Makona-GE1, complete genome |
| AKI84248 | Democratic | Aug. 16, 2014 | Jul. 19, 2015 | Zaire ebolavirus isolate Ebola virus/H.sapiens- |
| | Republic of | | | wt/COD/2014/Lomela-Lokolia-B11, partial |
| | the Congo | | | genome |
| AJA04385 | Democratic | Aug. 20, 2014 | Dec. 22, 2014 | Zaire ebolavirus isolate Ebola virus/H.sapiens- |
| | Republic of | | | wt/COD/2014/Lomela-Lokolia16, complete |
| | the Congo | | | genome |
| AJA04394 | Democratic | Aug. 20, 2014 | Dec. 22, 2014 | Zaire ebolavirus isolate Ebola virus/H.sapiens- |
| | Republic of | | | wt/COD/2014/Lomela-Lokolia17, partial genome |
| | the Congo | | | |
| AJA04403 | Democratic | Aug. 20, 2014 | Dec. 22, 2014 | Zaire ebolavirus isolate Ebola virus/H.sapiens- |
| | Republic of | | | wt/COD/2014/Lomela-Lokolia19, complete |
| | the Congo | | | genome |
| AIW65951 | United | Aug. 25, 2014 | Nov. 15, 2014 | Zaire ebolavirus isolate Ebola virus/H.sapiens- |
| | Kingdom | | | wt/GBR/2014/Makona-UK1, complete genome |
| AJE60745 | United | Dec. 29, 2014 | Jan. 21, 2015 | Zaire ebolavirus isolate Ebola virus/H.sapiens- |
| | Kingdom | | | wt/GBR/2014/Makona-UK2, partial genome |
| AKL91083 | Guinea | Mar. 19, 2014 | Jun. 17, 2015 | Zaire ebolavirus isolate Ebola virus/H.sapiens- |
| | | | | wt/GIN/2014/Makona-C05, partial genome |
| AKL91092 | Guinea | Mar. 19, 2014 | Jun. 17, 2015 | Zaire ebolavirus isolate Ebola virus/H.sapiens- |
| | | | | wt/GIN/2014/Makona-C05, partial genome |
| AKL91101 | Guinea | Mar. 20, 2014 | Jun. 17, 2015 | Zaire ebolavirus isolate Ebola virus/H.sapiens- |
| | | | | wt/GIN/2014/Makona-C07, partial genome |
| AKL91110 | Guinea | Mar. 20, 2014 | Jun. 17, 2015 | Zaire ebolavirus isolate Ebola virus/H.sapiens- |
| | | | | wt/GIN/2014/Makona-C07, partial genome |
| AKL91119 | Guinea | Mar. 17, 2014 | Jun. 17, 2015 | Zaire ebolavirus isolate Ebola virus/H.sapiens- |
| | | | | wt/GIN/2014/Makona-C15, partial genome |
| AKL91128 | Guinea | Mar. 17, 2014 | Jun. 17, 2015 | Zaire ebolavirus isolate Ebola virus/H.sapiens- |
| | | | | wt/GIN/2014/Makona-C15, partial genome |
| AKG65728 | Guinea | Sep. 18, 2014 | Jun. 26, 2015 | Zaire ebolavirus isolate Ebola virus/H.sapiens- |
| | | | | wt/GIN/2014/Makona-Conakry-1027, partial |
| | | | | genome |
| AKG65737 | Guinea | Sep. 19, 2014 | Jun. 26, 2015 | Zaire ebolavirus isolate Ebola virus/H.sapiens- |
| | | | | wt/GIN/2014/Makona-Conakry-1039, partial |
| | | | | genome |
| AKG65278 | Guinea | Sep. 19, 2014 | Jun. 26, 2015 | Zaire ebolavirus isolate Ebola virus/H.sapiens- |
| | | | | wt/GIN/2014/Makona-Conakry-1043, partial |
| | | | | genome |
| AKG65296 | Guinea | Sep. 21, 2014 | Jun. 26, 2015 | Zaire ebolavirus isolate Ebola virus/H.sapiens- |
| | | | | wt/GIN/2014/Makona-Conakry-1059, partial |
| | | | | genome |
| AKG65323 | Guinea | Sep. 22, 2014 | Jun. 26, 2015 | Zaire ebolavirus isolate Ebola virus/H.sapiens- |
| | | | | wt/GIN/2014/Makona-Conakry-1081, partial |
| | | | | genome |
| AKG65746 | Guinea | Sep. 24, 2014 | Jun. 26, 2015 | Zaire ebolavirus isolate Ebola virus/H.sapiens- |
| | | | | wt/GIN/2014/Makona-Conakry-1105, partial |
| | | | | genome |
| AKG65350 | Guinea | Sep. 25, 2014 | Jun. 26, 2015 | Zaire ebolavirus isolate Ebola virus/H.sapiens- |
| | | | | wt/GIN/2014/Makona-Conakry-1120, partial |
| | | | | genome |
| AKG65359 | Guinea | Sep. 25, 2014 | Jun. 26, 2015 | Zaire ebolavirus isolate Ebola virus/H.sapiens- |
| | | | | wt/GIN/2014/Makona-Conakry-1121, partial |
| | | | | genome |
| AKG65755 | Guinea | Sep. 25, 2014 | Jun. 26, 2015 | Zaire ebolavirus isolate Ebola virus/H.sapiens- |
| | | | | wt/GIN/2014/Makona-Conakry-1128, partial |
| | | | | genome |
| AKG65764 | Guinea | Sep. 25, 2014 | Jun. 26, 2015 | Zaire ebolavirus isolate Ebola virus/H.sapiens- |
| | | | | wt/GIN/2014/Makona-Conakry-1129, partial |
| | | | | genome |
| AKG65773 | Guinea | Sep. 27, 2014 | Jun. 26, 2015 | Zaire ebolavirus isolate Ebola virus/H.sapiens- |
| | | | | wt/GIN/2014/Makona-Conakry-1149, partial |
| | | | | genome |
| AKG65368 | Guinea | Sep. 28, 2014 | Jun. 26, 2015 | Zaire ebolavirus isolate Ebola virus/H.sapiens- |
| | | | | wt/GIN/2014/Makona-Conakry-1193, partial |
| | | | | genome |
| AKG65377 | Guinea | Oct. 2, 2014 | Jun. 26, 2015 | Zaire ebolavirus isolate Ebola virus/H.sapiens- |
| | | | | wt/GIN/2014/Makona-Conakry-1205, partial |
| | | | | genome |
| AKG65386 | Guinea | Oct. 2, 2014 | Jun. 26, 2015 | Zaire ebolavirus isolate Ebola virus/H.sapiens- |
| | | | | wt/GIN/2014/Makona-Conakry-1210, partial |
| | | | | genome |
| AKG65782 | Guinea | Oct. 2, 2014 | Jun. 26, 2015 | Zaire ebolavirus isolate Ebola virus/H.sapiens- |
| | | | | wt/GIN/2014/Makona-Conakry-1213, partial |
| | | | | genome |
| AKG65791 | Guinea | Oct. 2, 2014 | Jun. 26, 2015 | Zaire ebolavirus isolate Ebola virus/H.sapiens- |
| | | | | wt/GIN/2014/Makona-Conakry-1215, partial |
| | | | | genome |
| AKG65404 | Guinea | Oct. 4, 2014 | Jun. 26, 2015 | Zaire ebolavirus isolate Ebola virus/H.sapiens- |
| | | | | wt/GIN/2014/Makona-Conakry-1249, partial |
| | | | | genome |
| AKG65800 | Guinea | Oct. 4, 2014 | Jun. 26, 2015 | Zaire ebolavirus isolate Ebola virus/H.sapiens- |
| | | | | wt/GIN/2014/Makona-Conakry-1250, partial |
| | | | | genome |
| AKG65440 | Guinea | Oct. 6, 2014 | Jun. 26, 2015 | Zaire ebolavirus isolate Ebola virus/H.sapiens- |
| | | | | wt/GIN/2014/Makona-Conakry-1298, partial |
| | | | | genome |
| AKG65494 | Guinea | Oct. 8, 2014 | Jun. 26, 2015 | Zaire ebolavirus isolate Ebola virus/H.sapiens- |
| | | | | wt/GIN/2014/Makona-Conakry-1340, partial |
| | | | | genome |
| AKG65503 | Guinea | Oct. 8, 2014 | Jun. 26, 2015 | Zaire ebolavirus isolate Ebola virus/H.sapiens- |
| | | | | wt/GIN/2014/Makona-Conakry-1342, partial |
| | | | | genome |
| AKG65530 | Guinea | Oct. 10, 2014 | Jun. 26, 2015 | Zaire ebolavirus isolate Ebola virus/H.sapiens- |
| | | | | wt/GIN/2014/Makona-Conakry-1371, partial |
| | | | | genome |
| AKG65566 | Guinea | Oct. 14, 2014 | Jun. 26, 2015 | Zaire ebolavirus isolate Ebola virus/H.sapiens- |
| | | | | wt/GIN/2014/Makona-Conakry-1445, partial |
| | | | | genome |
| AKG65575 | Guinea | Oct. 14, 2014 | Jun. 26, 2015 | Zaire ebolavirus isolate Ebola virus/H.sapiens- |
| | | | | wt/GIN/2014/Makona-Conakry-1454, partial |
| | | | | genome |
| AKG65584 | Guinea | Oct. 15, 2014 | Jun. 26, 2015 | Zaire ebolavirus isolate Ebola virus/H.sapiens- |
| | | | | wt/GIN/2014/Makona-Conakry-1480, partial |
| | | | | genome |
| AKG65710 | Guinea | Oct. 15, 2014 | Jun. 26, 2015 | Zaire ebolavirus isolate Ebola virus/H.sapiens- |
| | | | | wt/GIN/2014/Makona-Conakry-1481, partial |
| | | | | genome |
| AKG65719 | Guinea | Oct. 16, 2014 | Jun. 26, 2015 | Zaire ebolavirus isolate Ebola virus/H.sapiens- |
| | | | | wt/GIN/2014/Makona-Conakry-1491, partial |
| | | | | genome |
| AKG65593 | Guinea | Oct. 18, 2014 | Jun. 26, 2015 | Zaire ebolavirus isolate Ebola virus/H.sapiens- |
| | | | | wt/GIN/2014/Makona-Conakry-1551, partial |
| | | | | genome |
| AKG65602 | Guinea | Oct. 19, 2014 | Jun. 26, 2015 | Zaire ebolavirus isolate Ebola virus/H.sapiens- |
| | | | | wt/GIN/2014/Makona-Conakry-1561, partial |
| | | | | genome |
| AKG65665 | Guinea | Oct. 24, 2014 | Jun. 26, 2015 | Zaire ebolavirus isolate Ebola virus/H.sapiens- |
| | | | | wt/GIN/2014/Makona-Conakry-1651, partial |
| | | | | genome |
| ALF04602 | Guinea | Oct. 13, 2014 | Sep. 26, 2015 | Zaire ebolavirus isolate Ebola virus/H.sapiens- |
| | | | | wt/GIN/2014/Makona-Conakry-211, partial |
| | | | | genome |
| ALF04596 | Guinea | Oct. 14, 2014 | Sep. 26, 2015 | Zaire ebolavirus isolate Ebola virus/H.sapiens- |
| | | | | wt/GIN/2014/Makona-Conakry-223, partial |
| | | | | genome |
| AKG65097 | Guinea | Jul. 24, 2014 | Jun. 26, 2015 | Zaire ebolavirus isolate Ebola virus/H.sapiens- |
| | | | | wt/GIN/2014/Makona-Conakry-505, partial |
| | | | | genome |
| AKG65809 | Guinea | Jul. 24, 2014 | Jun. 26, 2015 | Zaire ebolavirus isolate Ebola virus/H.sapiens- |
| | | | | wt/GIN/2014/Makona-Conakry-507, partial |
| | | | | genome |
| AKG65107 | Guinea | Jul. 24, 2014 | Jun. 26, 2015 | Zaire ebolavirus isolate Ebola virus/H.sapiens- |
| | | | | wt/GIN/2014/Makona-Conakry-509, partial |
| | | | | genome |
| AKG65134 | Guinea | Aug. 2, 2014 | Jun. 26, 2015 | Zaire ebolavirus isolate Ebola virus/H.sapiens- |
| | | | | wt/GIN/2014/Makona-Conakry-573, partial |
| | | | | genome |
| AKG65161 | Guinea | Aug. 15, 2014 | Jun. 26, 2015 | Zaire ebolavirus isolate Ebola virus/H.sapiens- |
| | | | | wt/GIN/2014/Makona-Conakry-653, partial |
| | | | | genome |
| AKG65170 | Guinea | Aug. 16, 2014 | Jun. 26, 2015 | Zaire ebolavirus isolate Ebola virus/H.sapiens- |
| | | | | wt/GIN/2014/Makona-Conakry-657, partial |
| | | | | genome |
| AKG65179 | Guinea | Aug. 19, 2014 | Jun. 26, 2015 | Zaire ebolavirus isolate Ebola virus/H.sapiens- |
| | | | | wt/GIN/2014/Makona-Conakry-678, partial |
| | | | | genome |
| AKG65188 | Guinea | Aug. 20, 2014 | Jun. 26, 2015 | Zaire ebolavirus isolate Ebola virus/H.sapiens- |
| | | | | wt/GIN/2014/Makona-Conakry-684, partial |
| | | | | genome |
| AKG65197 | Guinea | Aug. 21, 2014 | Jun. 26, 2015 | Zaire ebolavirus isolate Ebola virus/H.sapiens- |
| | | | | wt/GIN/2014/Makona-Conakry-691, partial |
| | | | | genome |
| AKG65206 | Guinea | Aug. 22, 2014 | Jun. 26, 2015 | Zaire ebolavirus isolate Ebola virus/H.sapiens- |
| | | | | wt/GIN/2014/Makona-Conakry-701, partial |
| | | | | genome |
| AKG65215 | Guinea | Aug. 26, 2014 | Jun. 26, 2015 | Zaire ebolavirus isolate Ebola virus/H.sapiens- |
| | | | | wt/GIN/2014/Makona-Conakry-740, partial |
| | | | | genome |
| AKG65818 | Guinea | Aug. 26, 2014 | Jun. 26, 2015 | Zaire ebolavirus isolate Ebola virus/H.sapiens- |
| | | | | wt/GIN/2014/Makona-Conakry-742, partial |
| | | | | genome |
| AKG65827 | Guinea | Aug. 27, 2014 | Jun. 26, 2015 | Zaire ebolavirus isolate Ebola virus/H.sapiens- |
| | | | | wt/GIN/2014/Makona-Conakry-768, partial |
| | | | | genome |
| AKG65224 | Guinea | Aug. 28, 2014 | Jun. 26, 2015 | Zaire ebolavirus isolate Ebola virus/H.sapiens- |
| | | | | wt/GIN/2014/Makona-Conakry-786, partial |
| | | | | genome |
| AKG65233 | Guinea | Aug. 28, 2014 | Jun. 26, 2015 | Zaire ebolavirus isolate Ebola virus/H.sapiens- |
| | | | | wt/GIN/2014/Makona-Conakry-787, partial |
| | | | | genome |
| AKG65260 | Guinea | Sep. 14, 2014 | Jun. 26, 2015 | Zaire ebolavirus isolate Ebola virus/H.sapiens- |
| | | | | wt/GIN/2014/Makona-Conakry-976, partial |
| | | | | genome |
| AKG65305 | Guinea | Sep. 21, 2014 | Jun. 26, 2015 | Zaire ebolavirus isolate Ebola virus/H.sapiens- |
| | | | | wt/GIN/2014/Makona-Coyah-1063, partial |
| | | | | genome |
| AKG65413 | Guinea | Oct. 4, 2014 | Jun. 26, 2015 | Zaire ebolavirus isolate Ebola virus/H.sapiens- |
| | | | | wt/GIN/2014/Makona-Coyah-1274, partial |
| | | | | genome |
| AKG65422 | Guinea | Oct. 4, 2014 | Jun. 26, 2015 | Zaire ebolavirus isolate Ebola virus/H.sapiens- |
| | | | | wt/GIN/2014/Makona-Coyah-1277, partial |
| | | | | genome |
| AKG65431 | Guinea | Oct. 4, 2014 | Jun. 26, 2015 | Zaire ebolavirus isolate Ebola virus/H.sapiens- |
| | | | | wt/GIN/2014/Makona-Coyah-1278, partial |
| | | | | genome |
| AKG65836 | Guinea | Oct. 4, 2014 | Jun. 26, 2015 | Zaire ebolavirus isolate Ebola virus/H.sapiens- |
| | | | | wt/GIN/2014/Makona-Coyah-1279, partial |
| | | | | genome |
| AKG65449 | Guinea | Oct. 7, 2014 | Jun. 26, 2015 | Zaire ebolavirus isolate Ebola virus/H.sapiens- |
| | | | | wt/GIN/2014/Makona-Coyah-1316, partial |
| | | | | genome |
| AKG65845 | Guinea | Oct. 7, 2014 | Jun. 26, 2015 | Zaire ebolavirus isolate Ebola virus/H.sapiens- |
| | | | | wt/GIN/2014/Makona-Coyah-1320, partial |
| | | | | genome |
| AKG65458 | Guinea | Oct. 7, 2014 | Jun. 26, 2015 | Zaire ebolavirus isolate Ebola virus/H.sapiens- |
| | | | | wt/GIN/2014/Makona-Coyah-1321, partial |
| | | | | genome |
| AKG65854 | Guinea | Oct. 7, 2014 | Jun. 26, 2015 | Zaire ebolavirus isolate Ebola virus/H.sapiens- |
| | | | | wt/GIN/2014/Makona-Coyah-1327, partial |
| | | | | genome |
| AKG65476 | Guinea | Oct. 7, 2014 | Jun. 26, 2015 | Zaire ebolavirus isolate Ebola virus/H.sapiens- |
| | | | | wt/GIN/2014/Makona-Coyah-1333, partial |
| | | | | genome |
| AKG65485 | Guinea | Oct. 8, 2014 | Jun. 26, 2015 | Zaire ebolavirus isolate Ebola virus/H.sapiens- |
| | | | | wt/GIN/2014/Makona-Coyah-1339, partial |
| | | | | genome |
| AKG65512 | Guinea | Oct. 9, 2014 | Jun. 26, 2015 | Zaire ebolavirus isolate Ebola virus/H.sapiens- |
| | | | | wt/GIN/2014/Makona-Coyah-1355, partial |
| | | | | genome |
| AKG65539 | Guinea | Oct. 10, 2014 | Jun. 26, 2015 | Zaire ebolavirus isolate Ebola virus/H.sapiens- |
| | | | | wt/GIN/2014/Makona-Coyah-1374, partial |
| | | | | genome |
| AKG65548 | Guinea | Oct. 11, 2014 | Jun. 26, 2015 | Zaire ebolavirus isolate Ebola virus/H.sapiens- |
| | | | | wt/GIN/2014/Makona-Coyah-1394, partial |
| | | | | genome |
| AKG65557 | Guinea | Oct. 13, 2014 | Jun. 26, 2015 | Zaire ebolavirus isolate Ebola virus/H.sapiens- |
| | | | | wt/GIN/2014/Makona-Coyah-1436, partial |
| | | | | genome |
| AKG65674 | Guinea | Oct. 24, 2014 | Jun. 26, 2015 | Zaire ebolavirus isolate Ebola virus/H.sapiens- |
| | | | | wt/GIN/2014/Makona-Coyah-1652, partial |
| | | | | genome |
| AKG65683 | Guinea | Oct. 24, 2014 | Jun. 26, 2015 | Zaire ebolavirus isolate Ebola virus/H.sapiens- |
| | | | | wt/GIN/2014/Makona-Coyah-1686, partial |
| | | | | genome |
| AKG65692 | Guinea | Oct. 25, 2014 | Jun. 26, 2015 | Zaire ebolavirus isolate Ebola virus/H.sapiens- |
| | | | | wt/GIN/2014/Makona-Coyah-1689, partial |
| | | | | genome |
| AKG65701 | Guinea | Oct. 25, 2014 | Jun. 26, 2015 | Zaire ebolavirus isolate Ebola virus/H.sapiens- |
| | | | | wt/GIN/2014/Makona-Coyah-1690, partial |
| | | | | genome |
| AKG65251 | Guinea | Sep. 11, 2014 | Jun. 26, 2015 | Zaire ebolavirus isolate Ebola virus/H.sapiens- |
| | | | | wt/GIN/2014/Makona-Coyah-955, partial genome |
| AKG65332 | Guinea | Sep. 24, 2014 | Jun. 26, 2015 | Zaire ebolavirus isolate Ebola virus/H.sapiens- |
| | | | | wt/GIN/2014/Makona-Dalaba-1104, partial |
| | | | | genome |
| AKG65341 | Guinea | Sep. 24, 2014 | Jun. 26, 2015 | Zaire ebolavirus isolate Ebola virus/H.sapiens- |
| | | | | wt/GIN/2014/Makona-Dalaba-1116, partial |
| | | | | genome |
| AKG65395 | Guinea | Oct. 2, 2014 | Jun. 26, 2015 | Zaire ebolavirus isolate Ebola virus/H.sapiens- |
| | | | | wt/GIN/2014/Makona-Dalaba-1211, partial |
| | | | | genome |
| AKG65242 | Guinea | Aug. 29, 2014 | Jun. 26, 2015 | Zaire ebolavirus isolate Ebola virus/H.sapiens- |
| | | | | wt/GIN/2014/Makona-Dubreka-789, partial |
| | | | | genome |
| AKI82636 | Guinea | Sep. 1, 2014 | Jun. 12, 2015 | Zaire ebolavirus isolate Ebola virus/H.sapiens- |
| | | | | wt/GIN/2014/Makona-EM_000015, partial |
| | | | | genome |
| AKI82645 | Guinea | Sep. 1, 2014 | Jun. 12, 2015 | Zaire ebolavirus isolate Ebola virus/H.sapiens- |
| | | | | wt/GIN/2014/Makona-EM_000027, partial |
| | | | | genome |
| AKI82654 | Guinea | Sep. 1, 2014 | Jun. 12, 2015 | Zaire ebolavirus isolate Ebola virus/H.sapiens- |
| | | | | wt/GIN/2014/Makona-EM_000028, partial |
| | | | | genome |
| AKI82663 | Guinea | Sep. 4, 2014 | Jun. 12, 2015 | Zaire ebolavirus isolate Ebola virus/H.sapiens- |
| | | | | wt/GIN/2014/Makona-EM_000127, partial |
| | | | | genome |
| AKI82672 | Guinea | Sep. 4, 2014 | Jun. 12, 2015 | Zaire ebolavirus isolate Ebola virus/H.sapiens- |
| | | | | wt/GIN/2014/Makona-EM_000128, partial |
| | | | | genome |
| AKI82681 | Guinea | Sep. 7, 2014 | Jun. 12, 2015 | Zaire ebolavirus isolate Ebola virus/H.sapiens- |
| | | | | wt/GIN/2014/Makona-EM_000218, partial |
| | | | | genome |
| AKI82690 | Guinea | Sep. 7, 2014 | Jun. 12, 2015 | Zaire ebolavirus isolate Ebola virus/H.sapiens- |
| | | | | wt/GIN/2014/Makona-EM_000219, partial |
| | | | | genome |
| AKI82699 | Guinea | Sep. 9, 2014 | Jun. 12, 2015 | Zaire ebolavirus isolate Ebola virus/H.sapiens- |
| | | | | wt/GIN/2014/Makona-EM_000321, partial |
| | | | | genome |
| AKI82708 | Guinea | Sep. 12, 2014 | Jun. 12, 2015 | Zaire ebolavirus isolate Ebola virus/H.sapiens- |
| | | | | wt/GIN/2014/Makona-EM_000457, partial |
| | | | | genome |
| AKI82717 | Guinea | Sep. 13, 2014 | Jun. 12, 2015 | Zaire ebolavirus isolate Ebola virus/H.sapiens- |
| | | | | wt/GIN/2014/Makona-EM_000500, partial |
| | | | | genome |
| AKI82726 | Guinea | Sep. 13, 2014 | Jun. 12, 2015 | Zaire ebolavirus isolate Ebola virus/H.sapiens- |
| | | | | wt/GIN/2014/Makona-EM_000501, partial |
| | | | | genome |
| AKI82735 | Guinea | Sep. 13, 2014 | Jun. 12, 2015 | Zaire ebolavirus isolate Ebola virus/H.sapiens- |
| | | | | wt/GIN/2014/Makona-EM_000502, partial |
| | | | | genome |
| AKI82744 | Guinea | Sep. 21, 2014 | Jun. 12, 2015 | Zaire ebolavirus isolate Ebola virus/H.sapiens- |
| | | | | wt/GIN/2014/Makona-EM_000706, partial |
| | | | | genome |
| AKI82753 | Guinea | Sep. 22, 2014 | Jun. 12, 2015 | Zaire ebolavirus isolate Ebola virus/H.sapiens- |
| | | | | wt/GIN/2014/Makona-EM_000707, partial |
| | | | | genome |
| AKI82762 | Guinea | Sep. 29, 2014 | Jun. 12, 2015 | Zaire ebolavirus isolate Ebola virus/H.sapiens- |
| | | | | wt/GIN/2014/Makona-EM_000921, partial |
| | | | | genome |
| AKI82771 | Guinea | Sep. 29, 2014 | Jun. 12, 2015 | Zaire ebolavirus isolate Ebola virus/H.sapiens- |
| | | | | wt/GIN/2014/Makona-EM_000925, partial |
| | | | | genome |
| AKI82780 | Guinea | Sep. 29, 2014 | Jun. 12, 2015 | Zaire ebolavirus isolate Ebola virus/H.sapiens- |
| | | | | wt/GIN/2014/Makona-EM_000934, partial |
| | | | | genome |
| AKI82789 | Guinea | Sep. 30, 2014 | Jun. 12, 2015 | Zaire ebolavirus isolate Ebola virus/H.sapiens- |
| | | | | wt/GIN/2014/Makona-EM_000958, partial |
| | | | | genome |
| AKI82798 | Guinea | Oct. 1, 2014 | Jun. 12, 2015 | Zaire ebolavirus isolate Ebola virus/H.sapiens- |
| | | | | wt/GIN/2014/Makona-EM_000968, partial |
| | | | | genome |
| AKI82807 | Guinea | Oct. 1, 2014 | Jun. 12, 2015 | Zaire ebolavirus isolate Ebola virus/H.sapiens- |
| | | | | wt/GIN/2014/Makona-EM_000982, partial |
| | | | | genome |
| AKI82816 | Guinea | Oct. 1, 2014 | Jun. 12, 2015 | Zaire ebolavirus isolate Ebola virus/H.sapiens- |
| | | | | wt/GIN/2014/Makona-EM_000983, partial |
| | | | | genome |
| AKI82825 | Guinea | Oct. 5, 2014 | Jun. 12, 2015 | Zaire ebolavirus isolate Ebola virus/H.sapiens- |
| | | | | wt/GIN/2014/Makona-EM_001101, partial |
| | | | | genome |
| AKI82834 | Guinea | Oct. 5, 2014 | Jun. 12, 2015 | Zaire ebolavirus isolate Ebola virus/H.sapiens- |
| | | | | wt/GIN/2014/Makona-EM_001102, partial |
| | | | | genome |
| AKI82843 | Guinea | Dec. 20, 2014 | Jun. 12, 2015 | Zaire ebolavirus isolate Ebola virus/H.sapiens- |
| | | | | wt/GIN/2014/Makona-EM_004059, partial |
| | | | | genome |
| AKI82852 | Guinea | Dec. 19, 2014 | Jun. 12, 2015 | Zaire ebolavirus isolate Ebola virus/H.sapiens- |
| | | | | wt/GIN/2014/Makona-EM_004085, partial |
| | | | | genome |
| AKI82861 | Guinea | Dec. 22, 2014 | Jun. 12, 2015 | Zaire ebolavirus isolate Ebola virus/H.sapiens- |
| | | | | wt/GIN/2014/Makona-EM_004192, partial |
| | | | | genome |
| AKI82870 | Guinea | Dec. 24, 2014 | Jun. 12, 2015 | Zaire ebolavirus isolate Ebola virus/H.sapiens- |
| | | | | wt/GIN/2014/Makona-EM_004201, partial |
| | | | | genome |
| AKI82879 | Guinea | Dec. 26, 2014 | Jun. 12, 2015 | Zaire ebolavirus isolate Ebola virus/H.sapiens- |
| | | | | wt/GIN/2014/Makona-EM_004259, partial |
| | | | | genome |
| AKI82888 | Guinea | Dec. 27, 2014 | Jun. 12, 2015 | Zaire ebolavirus isolate Ebola virus/H.sapiens- |
| | | | | wt/GIN/2014/Makona-EM_004290, partial |
| | | | | genome |
| AKI82996 | Guinea | Jul. 18, 2014 | Jun. 12, 2015 | Zaire ebolavirus isolate Ebola virus/H.sapiens- |
| | | | | wt/GIN/2014/Makona-EM_074335, partial |
| | | | | genome |
| AKI83050 | Guinea | Jul. 22, 2014 | Jun. 12, 2015 | Zaire ebolavirus isolate Ebola virus/H.sapiens- |
| | | | | wt/GIN/2014/Makona-EM_074354, partial |
| | | | | genome |
| AKI83077 | Guinea | Aug. 1, 2014 | Jun. 12, 2015 | Zaire ebolavirus isolate Ebola virus/H.sapiens- |
| | | | | wt/GIN/2014/Makona-EM_074436, partial |
| | | | | genome |
| AKI83086 | Guinea | Aug. 1, 2014 | Jun. 12, 2015 | Zaire ebolavirus isolate Ebola virus/H.sapiens- |
| | | | | wt/GIN/2014/Makona-EM_074437, partial |
| | | | | genome |
| AKI83095 | Guinea | Aug. 1, 2014 | Jun. 12, 2015 | Zaire ebolavirus isolate Ebola virus/H.sapiens- |
| | | | | wt/GIN/2014/Makona-EM_074438, partial |
| | | | | genome |
| AKI83104 | Guinea | Aug. 1, 2014 | Jun. 12, 2015 | Zaire ebolavirus isolate Ebola virus/H.sapiens- |
| | | | | wt/GIN/2014/Makona-EM_074439, partial |
| | | | | genome |
| AKI83113 | Guinea | Aug. 4, 2014 | Jun. 12, 2015 | Zaire ebolavirus isolate Ebola virus/H.sapiens- |
| | | | | wt/GIN/2014/Makona-EM_074461, partial |
| | | | | genome |
| AKI83122 | Guinea | Aug. 4, 2014 | Jun. 12, 2015 | Zaire ebolavirus isolate Ebola virus/H.sapiens- |
| | | | | wt/GIN/2014/Makona-EM_074462, partial |
| | | | | genome |
| AKI83131 | Guinea | Aug. 8, 2014 | Jun. 12, 2015 | Zaire ebolavirus isolate Ebola virus/H.sapiens- |
| | | | | wt/GIN/2014/Makona-EM_074531, partial |
| | | | | genome |
| AKI83149 | Guinea | Aug. 14, 2014 | Jun. 12, 2015 | Zaire ebolavirus isolate Ebola virus/H.sapiens- |
| | | | | wt/GIN/2014/Makona-EM_074684, partial |
| | | | | genome |
| AKI83167 | Guinea | Aug. 16, 2014 | Jun. 12, 2015 | Zaire ebolavirus isolate Ebola virus/H.sapiens- |
| | | | | wt/GIN/2014/Makona-EM_074785, partial |
| | | | | genome |
| AKI83203 | Guinea | Aug. 23, 2014 | Jun. 12, 2015 | Zaire ebolavirus isolate Ebola virus/H.sapiens- |
| | | | | wt/GIN/2014/Makona-EM_075076, partial |
| | | | | genome |
| AKI83212 | Guinea | Aug. 29, 2014 | Jun. 12, 2015 | Zaire ebolavirus isolate Ebola virus/H.sapiens- |
| | | | | wt/GIN/2014/Makona-EM_075368, partial |
| | | | | genome |
| AKI83221 | Guinea | Aug. 30, 2014 | Jun. 12, 2015 | Zaire ebolavirus isolate Ebola virus/H.sapiens- |
| | | | | wt/GIN/2014/Makona-EM_075373, partial |
| | | | | genome |
| AKI83230 | Guinea | Aug. 30, 2014 | Jun. 12, 2015 | Zaire ebolavirus isolate Ebola virus/H.sapiens- |
| | | | | wt/GIN/2014/Makona-EM_075435, partial |
| | | | | genome |
| AKI83239 | Guinea | Aug. 31, 2014 | Jun. 12, 2015 | Zaire ebolavirus isolate Ebola virus/H.sapiens- |
| | | | | wt/GIN/2014/Makona-EM_075447, partial |
| | | | | genome |
| AKI83248 | Guinea | Oct. 10, 2014 | Jun. 12, 2015 | Zaire ebolavirus isolate Ebola virus/H.sapiens- |
| | | | | wt/GIN/2014/Makona-EM_075928, partial |
| | | | | genome |
| AKI83257 | Guinea | Oct. 10, 2014 | Jun. 12, 2015 | Zaire ebolavirus isolate Ebola virus/H.sapiens- |
| | | | | wt/GIN/2014/Makona-EM_075929, partial |
| | | | | genome |
| AKI83266 | Guinea | Oct. 10, 2014 | Jun. 12, 2015 | Zaire ebolavirus isolate Ebola virus/H.sapiens- |
| | | | | wt/GIN/2014/Makona-EM_075930, partial |
| | | | | genome |
| AKI83275 | Guinea | Oct. 10, 2014 | Jun. 12, 2015 | Zaire ebolavirus isolate Ebola virus/H.sapiens- |
| | | | | wt/GIN/2014/Makona-EM_075931, partial |
| | | | | genome |
| AKI83284 | Guinea | Oct. 10, 2014 | Jun. 12, 2015 | Zaire ebolavirus isolate Ebola virus/H.sapiens- |
| | | | | wt/GIN/2014/Makona-EM_075932, partial |
| | | | | genome |
| AKI83293 | Guinea | Oct. 17, 2014 | Jun. 12, 2015 | Zaire ebolavirus isolate Ebola virus/H.sapiens- |
| | | | | wt/GIN/2014/Makona-EM_076138, partial |
| | | | | genome |
| AKI83302 | Guinea | Oct. 18, 2014 | Jun. 12, 2015 | Zaire ebolavirus isolate Ebola virus/H.sapiens- |
| | | | | wt/GIN/2014/Makona-EM_076191, partial |
| | | | | genome |
| AKI83311 | Guinea | Oct. 18, 2014 | Jun. 12, 2015 | Zaire ebolavirus isolate Ebola virus/H.sapiens- |
| | | | | wt/GIN/2014/Makona-EM_076192, partial |
| | | | | genome |
| AKI83320 | Guinea | Oct. 18, 2014 | Jun. 12, 2015 | Zaire ebolavirus isolate Ebola virus/H.sapiens- |
| | | | | wt/GIN/2014/Makona-EM_076193, partial |
| | | | | genome |
| AKI83329 | Guinea | Oct. 19, 2014 | Jun. 12, 2015 | Zaire ebolavirus isolate Ebola virus/H.sapiens- |
| | | | | wt/GIN/2014/Makona-EM_076217, partial |
| | | | | genome |
| AKI83338 | Guinea | Oct. 22, 2014 | Jun. 12, 2015 | Zaire ebolavirus isolate Ebola virus/H.sapiens- |
| | | | | wt/GIN/2014/Makona-EM_076322, partial |
| | | | | genome |
| AKI83347 | Guinea | Oct. 23, 2014 | Jun. 12, 2015 | Zaire ebolavirus isolate Ebola virus/H.sapiens- |
| | | | | wt/GIN/2014/Makona-EM_076334, partial |
| | | | | genome |
| AKI83356 | Guinea | Oct. 23, 2014 | Jun. 12, 2015 | Zaire ebolavirus isolate Ebola virus/H.sapiens- |
| | | | | wt/GIN/2014/Makona-EM_076335, partial |
| | | | | genome |
| AKI83365 | Guinea | Oct. 26, 2014 | Jun. 12, 2015 | Zaire ebolavirus isolate Ebola virus/H.sapiens- |
| | | | | wt/GIN/2014/Makona-EM_076383, partial |
| | | | | genome |
| AKI83374 | Guinea | Oct. 27, 2014 | Jun. 12, 2015 | Zaire ebolavirus isolate Ebola virus/H.sapiens- |
| | | | | wt/GIN/2014/Makona-EM_076403, partial |
| | | | | genome |
| AKI83383 | Guinea | Oct. 29, 2014 | Jun. 12, 2015 | Zaire ebolavirus isolate Ebola virus/H.sapiens- |
| | | | | wt/GIN/2014/Makona-EM_076472, partial |
| | | | | genome |
| AKI83392 | Guinea | Nov. 1, 2014 | Jun. 12, 2015 | Zaire ebolavirus isolate Ebola virus/H.sapiens- |
| | | | | wt/GIN/2014/Makona-EM_076533, partial |
| | | | | genome |
| AKI83401 | Guinea | Nov. 1, 2014 | Jun. 12, 2015 | Zaire ebolavirus isolate Ebola virus/H.sapiens- |
| | | | | wt/GIN/2014/Makona-EM_076534, partial |
| | | | | genome |
| AKI83410 | Guinea | Nov. 3, 2014 | Jun. 12, 2015 | Zaire ebolavirus isolate Ebola virus/H.sapiens- |
| | | | | wt/GIN/2014/Makona-EM_076610, partial |
| | | | | genome |
| AKI83419 | Guinea | Nov. 3, 2014 | Jun. 12, 2015 | Zaire ebolavirus isolate Ebola virus/H.sapiens- |
| | | | | wt/GIN/2014/Makona-EM_076615, partial |
| | | | | genome |
| AKI83428 | Guinea | Nov. 8, 2014 | Jun. 12, 2015 | Zaire ebolavirus isolate Ebola virus/H.sapiens- |
| | | | | wt/GIN/2014/Makona-EM_076769, partial |
| | | | | genome |
| AKI83437 | Guinea | Nov. 8, 2014 | Jun. 12, 2015 | Zaire ebolavirus isolate Ebola virus/H.sapiens- |
| | | | | wt/GIN/2014/Makona-EM_076770, partial |
| | | | | genome |
| AKI83446 | Guinea | Nov. 13, 2014 | Jun. 12, 2015 | Zaire ebolavirus isolate Ebola virus/H.sapiens- |
| | | | | wt/GIN/2014/Makona-EM_076948, partial |
| | | | | genome |
| AKI83455 | Guinea | Nov. 13, 2014 | Jun. 12, 2015 | Zaire ebolavirus isolate Ebola virus/H.sapiens- |
| | | | | wt/GIN/2014/Makona-EM_076949, partial |
| | | | | genome |
| AKI83464 | Guinea | Nov. 13, 2014 | Jun. 12, 2015 | Zaire ebolavirus isolate Ebola virus/H.sapiens- |
| | | | | wt/GIN/2014/Makona-EM_076951, partial |
| | | | | genome |
| AKI83473 | Guinea | Nov. 24, 2014 | Jun. 12, 2015 | Zaire ebolavirus isolate Ebola virus/H.sapiens- |
| | | | | wt/GIN/2014/Makona-EM_078415, partial |
| | | | | genome |
| AKI83482 | Guinea | Nov. 24, 2014 | Jun. 12, 2015 | Zaire ebolavirus isolate Ebola virus/H.sapiens- |
| | | | | wt/GIN/2014/Makona-EM_078416, partial |
| | | | | genome |
| AKI83491 | Guinea | Dec. 1, 2014 | Jun. 12, 2015 | Zaire ebolavirus isolate Ebola virus/H.sapiens- |
| | | | | wt/GIN/2014/Makona-EM_078555, partial |
| | | | | genome |
| AKI83500 | Guinea | Dec. 1, 2014 | Jun. 12, 2015 | Zaire ebolavirus isolate Ebola virus/H.sapiens- |
| | | | | wt/GIN/2014/Makona-EM_078556, partial |
| | | | | genome |
| AKI83509 | Guinea | Dec. 4, 2014 | Jun. 12, 2015 | Zaire ebolavirus isolate Ebola virus/H.sapiens- |
| | | | | wt/GIN/2014/Makona-EM_078608, partial |
| | | | | genome |
| AKI83518 | Guinea | Dec. 3, 2014 | Jun. 12, 2015 | Zaire ebolavirus isolate Ebola virus/H.sapiens- |
| | | | | wt/GIN/2014/Makona-EM_078638, partial |
| | | | | genome |
| AKI83527 | Guinea | Dec. 4, 2014 | Jun. 12, 2015 | Zaire ebolavirus isolate Ebola virus/H.sapiens- |
| | | | | wt/GIN/2014/Makona-EM_078639, partial |
| | | | | genome |
| AKI83536 | Guinea | Dec. 9, 2014 | Jun. 12, 2015 | Zaire ebolavirus isolate Ebola virus/H.sapiens- |
| | | | | wt/GIN/2014/Makona-EM_078654, partial |
| | | | | genome |
| AKI83545 | Guinea | Dec. 9, 2014 | Jun. 12, 2015 | Zaire ebolavirus isolate Ebola virus/H.sapiens- |
| | | | | wt/GIN/2014/Makona-EM_078656, partial |
| | | | | genome |
| AKI83554 | Guinea | Dec. 11, 2014 | Jun. 12, 2015 | Zaire ebolavirus isolate Ebola virus/H.sapiens- |
| | | | | wt/GIN/2014/Makona-EM_078670, partial |
| | | | | genome |
| AKI83563 | Guinea | Dec. 11, 2014 | Jun. 12, 2015 | Zaire ebolavirus isolate Ebola virus/H.sapiens- |
| | | | | wt/GIN/2014/Makona-EM_078683, partial |
| | | | | genome |
| AKI83572 | Guinea | Dec. 14, 2014 | Jun. 12, 2015 | Zaire ebolavirus isolate Ebola virus/H.sapiens- |
| | | | | wt/GIN/2014/Makona-EM_078694, partial |
| | | | | genome |
| AKI83581 | Guinea | Dec. 14, 2014 | Jun. 12, 2015 | Zaire ebolavirus isolate Ebola virus/H.sapiens- |
| | | | | wt/GIN/2014/Makona-EM_078697, partial |
| | | | | genome |
| AKI83590 | Guinea | Dec. 15, 2014 | Jun. 12, 2015 | Zaire ebolavirus isolate Ebola virus/H.sapiens- |
| | | | | wt/GIN/2014/Makona-EM_078706, partial |
| | | | | genome |
| AKI83599 | Guinea | Dec. 14, 2014 | Jun. 12, 2015 | Zaire ebolavirus isolate Ebola virus/H.sapiens- |
| | | | | wt/GIN/2014/Makona-EM_078709, partial |
| | | | | genome |
| AKI83608 | Guinea | Dec. 16, 2014 | Jun. 12, 2015 | Zaire ebolavirus isolate Ebola virus/H.sapiens- |
| | | | | wt/GIN/2014/Makona-EM_078722, partial |
| | | | | genome |
| AKI83617 | Guinea | Dec. 17, 2014 | Jun. 12, 2015 | Zaire ebolavirus isolate Ebola virus/H.sapiens- |
| | | | | wt/GIN/2014/Makona-EM_078763, partial |
| | | | | genome |
| AKI83626 | Guinea | Dec. 18, 2014 | Jun. 12, 2015 | Zaire ebolavirus isolate Ebola virus/H.sapiens- |
| | | | | wt/GIN/2014/Makona-EM_078779, partial |
| | | | | genome |
| AKI83635 | Guinea | Jul. 30, 2014 | Jun. 12, 2015 | Zaire ebolavirus isolate Ebola virus/H.sapiens- |
| | | | | wt/GIN/2014/Makona-EM_079388, partial |
| | | | | genome |
| AKI83644 | Guinea | Mar. 28, 2014 | Jun. 12, 2015 | Zaire ebolavirus isolate Ebola virus/H.sapiens- |
| | | | | wt/GIN/2014/Makona-EM_079404, partial |
| | | | | genome |
| AKI83653 | Guinea | Mar. 28, 2014 | Jun. 12, 2015 | Zaire ebolavirus isolate Ebola virus/H.sapiens- |
| | | | | wt/GIN/2014/Makona-EM_079405, partial |
| | | | | genome |
| AKI83662 | Guinea | Mar. 31, 2014 | Jun. 12, 2015 | Zaire ebolavirus isolate Ebola virus/H.sapiens- |
| | | | | wt/GIN/2014/Makona-EM_079408, partial |
| | | | | genome |
| AKI83671 | Guinea | Mar. 31, 2014 | Jun. 12, 2015 | Zaire ebolavirus isolate Ebola virus/H.sapiens- |
| | | | | wt/GIN/2014/Makona-EM_079410, partial |
| | | | | genome |
| AKI83680 | Guinea | Mar. 31, 2014 | Jun. 12, 2015 | Zaire ebolavirus isolate Ebola virus/H.sapiens- |
| | | | | wt/GIN/2014/Makona-EM_079412, partial |
| | | | | genome |
| AKI83689 | Guinea | Mar. 31, 2014 | Jun. 12, 2015 | Zaire ebolavirus isolate Ebola virus/H.sapiens- |
| | | | | wt/GIN/2014/Makona-EM_079413, partial |
| | | | | genome |
| AKI83698 | Guinea | Mar. 31, 2014 | Jun. 12, 2015 | Zaire ebolavirus isolate Ebola virus/H.sapiens- |
| | | | | wt/GIN/2014/Makona-EM_079414, partial |
| | | | | genome |
| AKI83707 | Guinea | Mar. 30, 2014 | Jun. 12, 2015 | Zaire ebolavirus isolate Ebola virus/H.sapiens- |
| | | | | wt/GIN/2014/Makona-EM_079421, partial |
| | | | | genome |
| AKI83716 | Guinea | Mar. 27, 2014 | Jun. 12, 2015 | Zaire ebolavirus isolate Ebola virus/H.sapiens- |
| | | | | wt/GIN/2014/Makona-EM_079422, partial |
| | | | | genome |
| AKI83725 | Guinea | Mar. 27, 2014 | Jun. 12, 2015 | Zaire ebolavirus isolate Ebola virus/H.sapiens- |
| | | | | wt/GIN/2014/Makona-EM_079423, partial |
| | | | | genome |
| AKI83734 | Guinea | Mar. 27, 2014 | Jun. 12, 2015 | Zaire ebolavirus isolate Ebola virus/H.sapiens- |
| | | | | wt/GIN/2014/Makona-EM_079424, partial |
| | | | | genome |
| AKI83743 | Guinea | Apr. 2, 2014 | Jun. 12, 2015 | Zaire ebolavirus isolate Ebola virus/H.sapiens- |
| | | | | wt/GIN/2014/Makona-EM_079429, partial |
| | | | | genome |
| AKI83752 | Guinea | Apr. 2, 2014 | Jun. 12, 2015 | Zaire ebolavirus isolate Ebola virus/H.sapiens- |
| | | | | wt/GIN/2014/Makona-EM_079434, partial |
| | | | | genome |
| AKI83761 | Guinea | Apr. 3, 2014 | Jun. 12, 2015 | Zaire ebolavirus isolate Ebola virus/H.sapiens- |
| | | | | wt/GIN/2014/Makona-EM_079442, partial |
| | | | | genome |
| AKI83770 | Guinea | Apr. 2, 2014 | Jun. 12, 2015 | Zaire ebolavirus isolate Ebola virus/H.sapiens- |
| | | | | wt/GIN/2014/Makona-EM_079444, partial |
| | | | | genome |
| AKI83788 | Guinea | Apr. 4, 2014 | Jun. 12, 2015 | Zaire ebolavirus isolate Ebola virus/H.sapiens- |
| | | | | wt/GIN/2014/Makona-EM_079464, partial |
| | | | | genome |
| AKI83797 | Guinea | Apr. 7, 2014 | Jun. 12, 2015 | Zaire ebolavirus isolate Ebola virus/H.sapiens- |
| | | | | wt/GIN/2014/Makona-EM_079497, partial |
| | | | | genome |
| AKI83806 | Guinea | Apr. 10, 2014 | Jun. 12, 2015 | Zaire ebolavirus isolate Ebola virus/H.sapiens- |
| | | | | wt/GIN/2014/Makona-EM_079514, partial |
| | | | | genome |
| AKI83815 | Guinea | Apr. 11, 2014 | Jun. 12, 2015 | Zaire ebolavirus isolate Ebola virus/H.sapiens- |
| | | | | wt/GIN/2014/Makona-EM_079517, partial |
| | | | | genome |
| AKI83824 | Guinea | Apr. 12, 2014 | Jun. 12, 2015 | Zaire ebolavirus isolate Ebola virus/H.sapiens- |
| | | | | wt/GIN/2014/Makona-EM_079542, partial |
| | | | | genome |
| AKI83833 | Guinea | Apr. 13, 2014 | Jun. 12, 2015 | Zaire ebolavirus isolate Ebola virus/H.sapiens- |
| | | | | wt/GIN/2014/Makona-EM_079549, partial |
| | | | | genome |
| AKI83842 | Guinea | Apr. 18, 2014 | Jun. 12, 2015 | Zaire ebolavirus isolate Ebola virus/H.sapiens- |
| | | | | wt/GIN/2014/Makona-EM_079578, partial |
| | | | | genome |
| AKI83851 | Guinea | Apr. 22, 2014 | Jun. 12, 2015 | Zaire ebolavirus isolate Ebola virus/H.sapiens- |
| | | | | wt/GIN/2014/Makona-EM_079587, partial |
| | | | | genome |
| AKI83860 | Guinea | Apr. 28, 2014 | Jun. 12, 2015 | Zaire ebolavirus isolate Ebola virus/H.sapiens- |
| | | | | wt/GIN/2014/Makona-EM_079622, partial |
| | | | | genome |
| AKI83869 | Guinea | May 1, 2014 | Jun. 12, 2015 | Zaire ebolavirus isolate Ebola virus/H.sapiens- |
| | | | | wt/GIN/2014/Makona-EM_079630, partial |
| | | | | genome |
| AKI83878 | Guinea | May 7, 2014 | Jun. 12, 2015 | Zaire ebolavirus isolate Ebola virus/H.sapiens- |
| | | | | wt/GIN/2014/Makona-EM_079657, partial |
| | | | | genome |
| AKI83887 | Guinea | May 7, 2014 | Jun. 12, 2015 | Zaire ebolavirus isolate Ebola virus/H.sapiens- |
| | | | | wt/GIN/2014/Makona-EM_079659, partial |
| | | | | genome |
| AKI83896 | Guinea | May 10, 2014 | Jun. 12, 2015 | Zaire ebolavirus isolate Ebola virus/H.sapiens- |
| | | | | wt/GIN/2014/Makona-EM_079677, partial |
| | | | | genome |
| AKI83905 | Guinea | May 11, 2014 | Jun. 12, 2015 | Zaire ebolavirus isolate Ebola virus/H.sapiens- |
| | | | | wt/GIN/2014/Makona-EM_079681, partial |
| | | | | genome |
| AKI83914 | Guinea | May 11, 2014 | Jun. 12, 2015 | Zaire ebolavirus isolate Ebola virus/H.sapiens- |
| | | | | wt/GIN/2014/Makona-EM_079685, partial |
| | | | | genome |
| AKI83923 | Guinea | May 14, 2014 | Jun. 12, 2015 | Zaire ebolavirus isolate Ebola virus/H.sapiens- |
| | | | | wt/GIN/2014/Makona-EM_079702, partial |
| | | | | genome |
| AKI83932 | Guinea | May 18, 2014 | Jun. 12, 2015 | Zaire ebolavirus isolate Ebola virus/H.sapiens- |
| | | | | wt/GIN/2014/Makona-EM_079731, partial |
| | | | | genome |
| AKI83941 | Guinea | May 21, 2014 | Jun. 12, 2015 | Zaire ebolavirus isolate Ebola virus/H.sapiens- |
| | | | | wt/GIN/2014/Makona-EM_079749, partial |
| | | | | genome |
| AKI83950 | Guinea | May 21, 2014 | Jun. 12, 2015 | Zaire ebolavirus isolate Ebola virus/H.sapiens- |
| | | | | wt/GIN/2014/Makona-EM_079750, partial |
| | | | | genome |
| AKI83959 | Guinea | May 22, 2014 | Jun. 12, 2015 | Zaire ebolavirus isolate Ebola virus/H.sapiens- |
| | | | | wt/GIN/2014/Makona-EM_079753, partial |
| | | | | genome |
| AKI83968 | Guinea | May 24, 2014 | Jun. 12, 2015 | Zaire ebolavirus isolate Ebola virus/H.sapiens- |
| | | | | wt/GIN/2014/Makona-EM_079772, partial |
| | | | | genome |
| AKI83977 | Guinea | May 24, 2014 | Jun. 12, 2015 | Zaire ebolavirus isolate Ebola virus/H.sapiens- |
| | | | | wt/GIN/2014/Makona-EM_079775, partial |
| | | | | genome |
| AKI83986 | Guinea | May 28, 2014 | Jun. 12, 2015 | Zaire ebolavirus isolate Ebola virus/H.sapiens- |
| | | | | wt/GIN/2014/Makona-EM_079815, partial |
| | | | | genome |
| AKI83995 | Guinea | Jun. 1, 2014 | Jun. 12, 2015 | Zaire ebolavirus isolate Ebola virus/H.sapiens- |
| | | | | wt/GIN/2014/Makona-EM_079859, partial |
| | | | | genome |
| AKI84004 | Guinea | Jun. 5, 2014 | Jun. 12, 2015 | Zaire ebolavirus isolate Ebola virus/H.sapiens- |
| | | | | wt/GIN/2014/Makona-EM_079876, partial |
| | | | | genome |
| AKI84013 | Guinea | Jun. 5, 2014 | Jun. 12, 2015 | Zaire ebolavirus isolate Ebola virus/H.sapiens- |
| | | | | wt/GIN/2014/Makona-EM_079880, partial |
| | | | | genome |
| AKI84022 | Guinea | Jun. 9, 2014 | Jun. 12, 2015 | Zaire ebolavirus isolate Ebola virus/H.sapiens- |
| | | | | wt/GIN/2014/Makona-EM_079910, partial |
| | | | | genome |
| AKI84031 | Guinea | Jun. 9, 2014 | Jun. 12, 2015 | Zaire ebolavirus isolate Ebola virus/H.sapiens- |
| | | | | wt/GIN/2014/Makona-EM_079911, partial |
| | | | | genome |
| AKI84040 | Guinea | Jun. 9, 2014 | Jun. 12, 2015 | Zaire ebolavirus isolate Ebola virus/H.sapiens- |
| | | | | wt/GIN/2014/Makona-EM_079912, partial |
| | | | | genome |
| AKI84049 | Guinea | Jun. 9, 2014 | Jun. 12, 2015 | Zaire ebolavirus isolate Ebola virus/H.sapiens- |
| | | | | wt/GIN/2014/Makona-EM_079913, partial |
| | | | | genome |
| AKI84058 | Guinea | Jun. 10, 2014 | Jun. 12, 2015 | Zaire ebolavirus isolate Ebola virus/H.sapiens- |
| | | | | wt/GIN/2014/Makona-EM_079914, partial |
| | | | | genome |
| AKI84067 | Guinea | Jun. 10, 2014 | Jun. 12, 2015 | Zaire ebolavirus isolate Ebola virus/H.sapiens- |
| | | | | wt/GIN/2014/Makona-EM_079915, partial |
| | | | | genome |
| AKI84103 | Guinea | Jun. 20, 2014 | Jun. 12, 2015 | Zaire ebolavirus isolate Ebola virus/H.sapiens- |
| | | | | wt/GIN/2014/Makona-EM_080063, partial |
| | | | | genome |
| AKI84148 | Guinea | Jun. 22, 2014 | Jun. 12, 2015 | Zaire ebolavirus isolate Ebola virus/H.sapiens- |
| | | | | wt/GIN/2014/Makona-EM_080076, partial |
| | | | | genome |
| AKI84166 | Guinea | Jun. 25, 2014 | Jun. 12, 2015 | Zaire ebolavirus isolate Ebola virus/H.sapiens- |
| | | | | wt/GIN/2014/Makona-EM_080141, partial |
| | | | | genome |
| AKI84211 | Guinea | Jul. 10, 2014 | Jun. 12, 2015 | Zaire ebolavirus isolate Ebola virus/H.sapiens- |
| | | | | wt/GIN/2014/Makona-EM_080253, partial |
| | | | | genome |
| AKG65314 | Guinea | Sep. 21, 2014 | Jun. 26, 2015 | Zaire ebolavirus isolate Ebola virus/H.sapiens- |
| | | | | wt/GIN/2014/Makona-Forecariah-1069, partial |
| | | | | genome |
| AKG65521 | Guinea | Oct. 9, 2014 | Jun. 26, 2015 | Zaire ebolavirus isolate Ebola virus/H.sapiens- |
| | | | | wt/GIN/2014/Makona-Forecariah-1365, partial |
| | | | | genome |
| AKG65611 | Guinea | Oct. 18, 2014 | Jun. 26, 2015 | Zaire ebolavirus isolate Ebola virus/H.sapiens- |
| | | | | wt/GIN/2014/Makona-Forecariah-1567, partial |
| | | | | genome |
| AKG65620 | Guinea | Oct. 18, 2014 | Jun. 26, 2015 | Zaire ebolavirus isolate Ebola virus/H.sapiens- |
| | | | | wt/GIN/2014/Makona-Forecariah-1568, partial |
| | | | | genome |
| AKG65629 | Guinea | Oct. 20, 2014 | Jun. 26, 2015 | Zaire ebolavirus isolate Ebola virus/H.sapiens- |
| | | | | wt/GIN/2014/Makona-Forecariah-1571, partial |
| | | | | genome |
| AKG65647 | Guinea | Oct. 24, 2014 | Jun. 26, 2015 | Zaire ebolavirus isolate Ebola virus/H.sapiens- |
| | | | | wt/GIN/2014/Makona-Forecariah-1623, partial |
| | | | | genome |
| AKG65269 | Guinea | Sep. 15, 2014 | Jun. 26, 2015 | Zaire ebolavirus isolate Ebola virus/H.sapiens- |
| | | | | wt/GIN/2014/Makona-Forecariah-989, partial |
| | | | | genome |
| AKG65143 | Guinea | Aug. 12, 2014 | Jun. 26, 2015 | Zaire ebolavirus isolate Ebola virus/H.sapiens- |
| | | | | wt/GIN/2014/Makona-Gueckedou-633, partial |
| | | | | genome |
| AKG65467 | Guinea | Oct. 7, 2014 | Jun. 26, 2015 | Zaire ebolavirus isolate Ebola virus/H.sapiens- |
| | | | | wt/GIN/2014/Makona-Kerouane-1331, partial |
| | | | | genome |
| AKG65287 | Guinea | Sep. 20, 2014 | Jun. 26, 2015 | Zaire ebolavirus isolate Ebola virus/H.sapiens- |
| | | | | wt/GIN/2014/Makona-Kindia-1047, partial |
| | | | | genome |
| AKG65656 | Guinea | Oct. 23, 2014 | Jun. 26, 2015 | Zaire ebolavirus isolate Ebola virus/H.sapiens- |
| | | | | wt/GIN/2014/Makona-Kindia-1648, partial |
| | | | | genome |
| ALF04584 | Guinea | Dec. 18, 2014 | Sep. 26, 2015 | Zaire ebolavirus isolate Ebola virus/H.sapiens- |
| | | | | wt/GIN/2014/Makona-Kindia-802, partial genome |
| AKG65125 | Guinea | Jul. 27, 2014 | Jun. 26, 2015 | Zaire ebolavirus isolate Ebola virus/H.sapiens- |
| | | | | wt/GIN/2014/Makona-Kouroussa-531, partial |
| | | | | genome |
| AKG65152 | Guinea | Aug. 14, 2014 | Jun. 26, 2015 | Zaire ebolavirus isolate Ebola virus/H.sapiens- |
| | | | | wt/GIN/2014/Makona-Macenta-645, partial |
| | | | | genome |
| AKG65638 | Guinea | Oct. 22, 2014 | Jun. 26, 2015 | Zaire ebolavirus isolate Ebola virus/H.sapiens- |
| | | | | wt/GIN/2014/Makona-Nzeerekore-1622, partial |
| | | | | genome |
| AKG65116 | Guinea | Jul. 24, 2014 | Jun. 26, 2015 | Zaire ebolavirus isolate Ebola virus/H.sapiens- |
| | | | | wt/GIN/2014/Makona-Siguiri-517, partial genome |
| AKI82897 | Guinea | Jan. 2, 2015 | Jun. 12, 2015 | Zaire ebolavirus isolate Ebola virus/H.sapiens- |
| | | | | wt/GIN/2015/Makona-EM_004414, partial |
| | | | | genome |
| AKI82906 | Guinea | Jan. 2, 2015 | Jun. 12, 2015 | Zaire ebolavirus isolate Ebola virus/H.sapiens- |
| | | | | wt/GIN/2015/Makona-EM_004422, partial |
| | | | | genome |
| AKI82915 | Guinea | Jan. 4, 2015 | Jun. 12, 2015 | Zaire ebolavirus isolate Ebola virus/H.sapiens- |
| | | | | wt/GIN/2015/Makona-EM_004437, partial |
| | | | | genome |
| AKI82924 | Guinea | Jan. 4, 2015 | Jun. 12, 2015 | Zaire ebolavirus isolate Ebola virus/H.sapiens- |
| | | | | wt/GIN/2015/Makona-EM_004438, partial |
| | | | | genome |
| AKI82933 | Guinea | Jan. 11, 2015 | Jun. 12, 2015 | Zaire ebolavirus isolate Ebola virus/H.sapiens- |
| | | | | wt/GIN/2015/Makona-EM_004481, partial |
| | | | | genome |
| AKI82942 | Guinea | Jan. 14, 2015 | Jun. 12, 2015 | Zaire ebolavirus isolate Ebola virus/H.sapiens- |
| | | | | wt/GIN/2015/Makona-EM_004494, partial |
| | | | | genome |
| AKI82951 | Guinea | Jan. 15, 2015 | Jun. 12, 2015 | Zaire ebolavirus isolate Ebola virus/H.sapiens- |
| | | | | wt/GIN/2015/Makona-EM_004503, partial |
| | | | | genome |
| AKI82960 | Guinea | Jan. 22, 2015 | Jun. 12, 2015 | Zaire ebolavirus isolate Ebola virus/H.sapiens- |
| | | | | wt/GIN/2015/Makona-EM_004555, partial |
| | | | | genome |
| AKI82969 | Guinea | Jan. 25, 2015 | Jun. 12, 2015 | Zaire ebolavirus isolate Ebola virus/H.sapiens- |
| | | | | wt/GIN/2015/Makona-EM_004563, partial |
| | | | | genome |
| AKI82978 | Guinea | Jan. 27, 2015 | Jun. 12, 2015 | Zaire ebolavirus isolate Ebola virus/H.sapiens- |
| | | | | wt/GIN/2015/Makona-EM_004580, partial |
| | | | | genome |
| AKI82987 | Guinea | Jan. 31, 2015 | Jun. 12, 2015 | Zaire ebolavirus isolate Ebola virus/H.sapiens- |
| | | | | wt/GIN/2015/Makona-EM_004589, partial |
| | | | | genome |
| AJZ74730 | Liberia | Sep. 23, 2014 | Mar. 30, 2015 | Zaire ebolavirus isolate Ebola virus/H.sapiens- |
| | | | | wt/LBR/2014/Makona-10054, partial genome |
| AIY27577 | Liberia | Aug. 3, 2014 | Nov. 26, 2014 | Zaire ebolavirus isolate Ebola virus/H.sapiens- |
| | | | | wt/LBR/2014/Makona-201403007, complete |
| | | | | genome |
| AKI83005 | Liberia | Jul. 22, 2014 | Jun. 12, 2015 | Zaire ebolavirus isolate Ebola virus/H.sapiens- |
| | | | | wt/LBR/2014/Makona-EM_074349, partial |
| | | | | genome |
| AKI83014 | Liberia | Jul. 22, 2014 | Jun. 12, 2015 | Zaire ebolavirus isolate Ebola virus/H.sapiens- |
| | | | | wt/LBR/2014/Makona-EM_074350, partial |
| | | | | genome |
| AKI83023 | Liberia | Jul. 22, 2014 | Jun. 12, 2015 | Zaire ebolavirus isolate Ebola virus/H.sapiens- |
| | | | | wt/LBR/2014/Makona-EM_074351, partial |
| | | | | genome |
| AKI83032 | Liberia | Jul. 22, 2014 | Jun. 12, 2015 | Zaire ebolavirus isolate Ebola virus/H.sapiens- |
| | | | | wt/LBR/2014/Makona-EM_074352, partial |
| | | | | genome |
| AKI83041 | Liberia | Jul. 22, 2014 | Jun. 12, 2015 | Zaire ebolavirus isolate Ebola virus/H.sapiens- |
| | | | | wt/LBR/2014/Makona-EM_074353, partial |
| | | | | genome |
| AKI83059 | Liberia | Jul. 26, 2014 | Jun. 12, 2015 | Zaire ebolavirus isolate Ebola virus/H.sapiens- |
| | | | | wt/LBR/2014/Makona-EM_074391, partial |
| | | | | genome |
| AKI83068 | Liberia | Jul. 25, 2014 | Jun. 12, 2015 | Zaire ebolavirus isolate Ebola virus/H.sapiens- |
| | | | | wt/LBR/2014/Makona-EM_074392, partial |
| | | | | genome |
| AKI83140 | Liberia | Aug. 8, 2014 | Jun. 12, 2015 | Zaire ebolavirus isolate Ebola virus/H.sapiens- |
| | | | | wt/LBR/2014/Makona-EM_074548, partial |
| | | | | genome |
| AKI83158 | Liberia | Aug. 14, 2014 | Jun. 12, 2015 | Zaire ebolavirus isolate Ebola virus/H.sapiens- |
| | | | | wt/LBR/2014/Makona-EM_074720, partial |
| | | | | genome |
| AKI83176 | Liberia | Aug. 17, 2014 | Jun. 12, 2015 | Zaire ebolavirus isolate Ebola virus/H.sapiens- |
| | | | | wt/LBR/2014/Makona-EM_074821, partial |
| | | | | genome |
| AKI83185 | Liberia | Aug. 17, 2014 | Jun. 12, 2015 | Zaire ebolavirus isolate Ebola virus/H.sapiens- |
| | | | | wt/LBR/2014/Makona-EM_074822, partial |
| | | | | genome |
| AKI83194 | Liberia | Aug. 22, 2014 | Jun. 12, 2015 | Zaire ebolavirus isolate Ebola virus/H.sapiens- |
| | | | | wt/LBR/2014/Makona-EM_075043, partial |
| | | | | genome |
| AKI83779 | Liberia | Apr. 1, 2014 | Jun. 12, 2015 | Zaire ebolavirus isolate Ebola virus/H.sapiens- |
| | | | | wt/LBR/2014/Makona-EM_079450, partial |
| | | | | genome |
| AKI84112 | Liberia | Jun. 20, 2014 | Jun. 12, 2015 | Zaire ebolavirus isolate Ebola virus/H.sapiens- |
| | | | | wt/LBR/2014/Makona-EM_080064, partial |
| | | | | genome |
| AKI84121 | Liberia | Jun. 20, 2014 | Jun. 12, 2015 | Zaire ebolavirus isolate Ebola virus/H.sapiens- |
| | | | | wt/LBR/2014/Makona-EM_080065, partial |
| | | | | genome |
| AKI84130 | Liberia | Jun. 20, 2014 | Jun. 12, 2015 | Zaire ebolavirus isolate Ebola virus/H.sapiens- |
| | | | | wt/LBR/2014/Makona-EM_080066, partial |
| | | | | genome |
| AKI84139 | Liberia | Jun. 20, 2014 | Jun. 12, 2015 | Zaire ebolavirus isolate Ebola virus/H.sapiens- |
| | | | | wt/LBR/2014/Makona-EM_080067, partial |
| | | | | genome |
| AKI84184 | Liberia | Jun. 29, 2014 | Jun. 12, 2015 | Zaire ebolavirus isolate Ebola virus/H.sapiens- |
| | | | | wt/LBR/2014/Makona-EM_080193, partial |
| | | | | genome |
| AKI84193 | Liberia | Jul. 3, 2014 | Jun. 12, 2015 | Zaire ebolavirus isolate Ebola virus/H.sapiens- |
| | | | | wt/LBR/2014/Makona-EM_080213, partial |
| | | | | genome |
| AKI84202 | Liberia | Jul. 4, 2014 | Jun. 12, 2015 | Zaire ebolavirus isolate Ebola virus/H.sapiens- |
| | | | | wt/LBR/2014/Makona-EM_080223, partial |
| | | | | genome |
| AKI84220 | Liberia | Jul. 12, 2014 | Jun. 12, 2015 | Zaire ebolavirus isolate Ebola virus/H.sapiens- |
| | | | | wt/LBR/2014/Makona-EM_080261, partial |
| | | | | genome |
| AKI84238 | Liberia | Jul. 12, 2014 | Jun. 12, 2015 | Zaire ebolavirus isolate Ebola virus/H.sapiens- |
| | | | | wt/LBR/2014/Makona-EM_080269, partial |
| | | | | genome |
| AJZ74520 | Liberia | Nov. 5, 2014 | Mar. 30, 2015 | Zaire ebolavirus isolate Ebola virus/H.sapiens- |
| | | | | wt/LBR/2014/Makona-LIBR0058, partial genome |
| AJZ74547 | Liberia | Nov. 6, 2014 | Mar. 30, 2015 | Zaire ebolavirus isolate Ebola virus/H.sapiens- |
| | | | | wt/LBR/2014/Makona-LIBR0067, partial genome |
| AJZ74556 | Liberia | Nov. 6, 2014 | Mar. 30, 2015 | Zaire ebolavirus isolate Ebola virus/H.sapiens- |
| | | | | wt/LBR/2014/Makona-LIBR0073, partial genome |
| AJZ74565 | Liberia | Nov. 8, 2014 | Mar. 30, 2015 | Zaire ebolavirus isolate Ebola virus/H.sapiens- |
| | | | | wt/LBR/2014/Makona-LIBR0090, partial genome |
| AJZ74574 | Liberia | Nov. 8, 2014 | Mar. 30, 2015 | Zaire ebolavirus isolate Ebola virus/H.sapiens- |
| | | | | wt/LBR/2014/Makona-LIBR0092, partial genome |
| AJZ74583 | Liberia | Nov. 8, 2014 | Mar. 30, 2015 | Zaire ebolavirus isolate Ebola virus/H.sapiens- |
| | | | | wt/LBR/2014/Makona-LIBR0093, partial genome |
| AJZ74592 | Liberia | Nov. 10, 2014 | Mar. 30, 2015 | Zaire ebolavirus isolate Ebola virus/H.sapiens- |
| | | | | wt/LBR/2014/Makona-LIBR0116, partial genome |
| AJZ74601 | Liberia | Nov. 13, 2014 | Mar. 30, 2015 | Zaire ebolavirus isolate Ebola virus/H.sapiens- |
| | | | | wt/LBR/2014/Makona-LIBR0168, partial genome |
| AJZ74626 | Liberia | Nov. 22, 2014 | Mar. 30, 2015 | Zaire ebolavirus isolate Ebola virus/H.sapiens- |
| | | | | wt/LBR/2014/Makona-LIBR0286, partial genome |
| AJZ74635 | Liberia | Nov. 25, 2014 | Mar. 30, 2015 | Zaire ebolavirus isolate Ebola virus/H.sapiens- |
| | | | | wt/LBR/2014/Makona-LIBR0333, partial genome |
| AJZ74644 | Liberia | Dec. 3, 2014 | Mar. 30, 2015 | Zaire ebolavirus isolate Ebola virus/H.sapiens- |
| | | | | wt/LBR/2014/Makona-LIBR0423, partial genome |
| AJZ74660 | Liberia | Dec. 10, 2014 | Mar. 30, 2015 | Zaire ebolavirus isolate Ebola virus/H.sapiens- |
| | | | | wt/LBR/2014/Makona-LIBR0503, partial genome |
| AJZ74669 | Liberia | Dec. 10, 2014 | Mar. 30, 2015 | Zaire ebolavirus isolate Ebola virus/H.sapiens- |
| | | | | wt/LBR/2014/Makona-LIBR0505, partial genome |
| AJZ74721 | Liberia | Oct. 1, 2014 | Mar. 30, 2015 | Zaire ebolavirus isolate Ebola virus/H.sapiens- |
| | | | | wt/LBR/2014/Makona-LIBR10053, partial |
| | | | | genome |
| AJZ74695 | Liberia | Jan. 20, 2015 | Mar. 30, 2015 | Zaire ebolavirus isolate Ebola virus/H.sapiens- |
| | | | | wt/LBR/2015/Makona-LIBR0993, partial genome |
| AJZ74712 | Liberia | Feb. 14, 2015 | Mar. 30, 2015 | Zaire ebolavirus isolate Ebola virus/H.sapiens- |
| | | | | wt/LBR/2015/Makona-LIBR1413, partial genome |
| AIZ68608 | Mali | Oct. 23, 2014 | Dec. 12, 2014 | Zaire ebolavirus isolate Ebola virus/H.sapiens- |
| | | | | wt/MLI/2014/Makona-Mali-DPR1, complete |
| | | | | genome |
| AIZ68616 | Mali | Nov. 12, 2014 | Dec. 12, 2014 | Zaire ebolavirus isolate Ebola virus/H.sapiens- |
| | | | | wt/MLI/2014/Makona-Mali-DPR2, complete |
| | | | | genome |
| AIZ68624 | Mali | Nov. 21, 2014 | Dec. 12, 2014 | Zaire ebolavirus isolate Ebola virus/H.sapiens- |
| | | | | wt/MLI/2014/Makona-Mali-DPR3, complete |
| | | | | genome |
| AIZ68632 | Mali | Nov. 12, 2014 | Dec. 12, 2014 | Zaire ebolavirus isolate Ebola virus/H.sapiens- |
| | | | | wt/MLI/2014/Makona-Mali-DPR4, complete |
| | | | | genome |
| AKG95786 | Sierra | Aug. 22, 2014 | May 17, 2015 | Zaire ebolavirus isolate Ebola virus/H.sapiens- |
| | Leone | | | wt/SLE/2014/Makona-20140008, partial genome |
| AKG95795 | Sierra | Aug. 20, 2014 | May 17, 2015 | Zaire ebolavirus isolate Ebola virus/H.sapiens- |
| | Leone | | | wt/SLE/2014/Makona-20140024, partial genome |
| AKG95930 | Sierra | Aug. 23, 2014 | May 17, 2015 | Zaire ebolavirus isolate Ebola virus/H.sapiens- |
| | Leone | | | wt/SLE/2014/Makona-20140038, partial genome |
| AKG95678 | Sierra | Aug. 22, 2014 | May 17, 2015 | Zaire ebolavirus isolate Ebola virus/H.sapiens- |
| | Leone | | | wt/SLE/2014/Makona-20140091, partial genome |
| AKG95696 | Sierra | Aug. 24, 2014 | May 17, 2015 | Zaire ebolavirus isolate Ebola virus/H.sapiens- |
| | Leone | | | wt/SLE/2014/Makona-20140100, partial genome |
| AKG95570 | Sierra | Aug. 26, 2014 | May 17, 2015 | Zaire ebolavirus isolate Ebola virus/H.sapiens- |
| | Leone | | | wt/SLE/2014/Makona-20140134, partial genome |
| AKG95912 | Sierra | Aug. 27, 2014 | May 17, 2015 | Zaire ebolavirus isolate Ebola virus/H.sapiens- |
| | Leone | | | wt/SLE/2014/Makona-20140161, partial genome |
| AKG96173 | Sierra | Aug. 27, 2014 | May 17, 2015 | Zaire ebolavirus isolate Ebola virus/H.sapiens- |
| | Leone | | | wt/SLE/2014/Makona-20140174, partial genome |
| AKG96191 | Sierra | Aug. 29, 2014 | May 17, 2015 | Zaire ebolavirus isolate Ebola virus/H.sapiens- |
| | Leone | | | wt/SLE/2014/Makona-20140254, partial genome |
| AKG96038 | Sierra | Sep. 2, 2014 | May 17, 2015 | Zaire ebolavirus isolate Ebola virus/H.sapiens- |
| | Leone | | | wt/SLE/2014/Makona-20140395, partial genome |
| AKG95741 | Sierra | Sep. 3, 2014 | May 17, 2015 | Zaire ebolavirus isolate Ebola virus/H.sapiens- |
| | Leone | | | wt/SLE/2014/Makona-20140433, partial genome |
| AKG96110 | Sierra | Sep. 3, 2014 | May 17, 2015 | Zaire ebolavirus isolate Ebola virus/H.sapiens- |
| | Leone | | | wt/SLE/2014/Makona-20140436, partial genome |
| AKG95642 | Sierra | Sep. 4, 2014 | May 17, 2015 | Zaire ebolavirus isolate Ebola virus/H.sapiens- |
| | Leone | | | wt/SLE/2014/Makona-20140489, partial genome |
| AKG95894 | Sierra | Sep. 5, 2014 | May 17, 2015 | Zaire ebolavirus isolate Ebola virus/H.sapiens- |
| | Leone | | | wt/SLE/2014/Makona-20140517, partial genome |
| AKG96029 | Sierra | Sep. 7, 2014 | May 17, 2015 | Zaire ebolavirus isolate Ebola virus/H.sapiens- |
| | Leone | | | wt/SLE/2014/Makona-20140590, partial genome |
| AKG96101 | Sierra | Sep. 10, 2014 | May 17, 2015 | Zaire ebolavirus isolate Ebola virus/H.sapiens- |
| | Leone | | | wt/SLE/2014/Makona-20140729, partial genome |
| AKG96200 | Sierra | Sep. 15, 2014 | May 17, 2015 | Zaire ebolavirus isolate Ebola virus/H.sapiens- |
| | Leone | | | wt/SLE/2014/Makona-20140872, partial genome |
| AKG95948 | Sierra | Sep. 18, 2014 | May 17, 2015 | Zaire ebolavirus isolate Ebola virus/H.sapiens- |
| | Leone | | | wt/SLE/2014/Makona-20140910, partial genome |
| AKG96047 | Sierra | Sep. 16, 2014 | May 17, 2015 | Zaire ebolavirus isolate Ebola virus/H.sapiens- |
| | Leone | | | wt/SLE/2014/Makona-20140933, partial genome |
| AKG95723 | Sierra | Sep. 21, 2014 | May 17, 2015 | Zaire ebolavirus isolate Ebola virus/H.sapiens- |
| | Leone | | | wt/SLE/2014/Makona-20141012, partial genome |
| AKG96272 | Sierra | Sep. 21, 2014 | May 17, 2015 | Zaire ebolavirus isolate Ebola virus/H.sapiens- |
| | Leone | | | wt/SLE/2014/Makona-20141043, partial genome |
| AKG95777 | Sierra | Sep. 21, 2014 | May 17, 2015 | Zaire ebolavirus isolate Ebola virus/H.sapiens- |
| | Leone | | | wt/SLE/2014/Makona-20141061, partial genome |
| AKG96146 | Sierra | Sep. 22, 2014 | May 17, 2015 | Zaire ebolavirus isolate Ebola virus/H.sapiens- |
| | Leone | | | wt/SLE/2014/Makona-20141123, partial genome |
| AKG96254 | Sierra | Sep. 26, 2014 | May 17, 2015 | Zaire ebolavirus isolate Ebola virus/H.sapiens- |
| | Leone | | | wt/SLE/2014/Makona-20141227, partial genome |
| AKG95921 | Sierra | Sep. 25, 2014 | May 17, 2015 | Zaire ebolavirus isolate Ebola virus/H.sapiens- |
| | Leone | | | wt/SLE/2014/Makona-20141232, partial genome |
| AKG96227 | Sierra | Sep. 24, 2014 | May 17, 2015 | Zaire ebolavirus isolate Ebola virus/H.sapiens- |
| | Leone | | | wt/SLE/2014/Makona-20141241, partial genome |
| AKG95876 | Sierra | Sep. 24, 2014 | May 17, 2015 | Zaire ebolavirus isolate Ebola virus/H.sapiens- |
| | Leone | | | wt/SLE/2014/Makona-20141271, partial genome |
| AKG96011 | Sierra | Sep. 23, 2014 | May 17, 2015 | Zaire ebolavirus isolate Ebola virus/H.sapiens- |
| | Leone | | | wt/SLE/2014/Makona-20141280, partial genome |
| AKG95588 | Sierra | Sep. 23, 2014 | May 17, 2015 | Zaire ebolavirus isolate Ebola virus/H.sapiens- |
| | Leone | | | wt/SLE/2014/Makona-20141282, partial genome |
| AKG95615 | Sierra | Sep. 23, 2014 | May 17, 2015 | Zaire ebolavirus isolate Ebola virus/H.sapiens- |
| | Leone | | | wt/SLE/2014/Makona-20141288, partial genome |
| AKG96083 | Sierra | Sep. 26, 2014 | May 17, 2015 | Zaire ebolavirus isolate Ebola virus/H.sapiens- |
| | Leone | | | wt/SLE/2014/Makona-20141352, partial genome |
| AKG96119 | Sierra | Sep. 28, 2014 | May 17, 2015 | Zaire ebolavirus isolate Ebola virus/H.sapiens- |
| | Leone | | | wt/SLE/2014/Makona-20141397, partial genome |
| AKG95867 | Sierra | Sep. 28, 2014 | May 17, 2015 | Zaire ebolavirus isolate Ebola virus/H.sapiens- |
| | Leone | | | wt/SLE/2014/Makona-20141429, partial genome |
| AKG96128 | Sierra | Oct. 1, 2014 | May 17, 2015 | Zaire ebolavirus isolate Ebola virus/H.sapiens- |
| | Leone | | | wt/SLE/2014/Makona-20141491, partial genome |
| AKG95984 | Sierra | Oct. 1, 2014 | May 17, 2015 | Zaire ebolavirus isolate Ebola virus/H.sapiens- |
| | Leone | | | wt/SLE/2014/Makona-20141497, partial genome |
| AKG95597 | Sierra | Oct. 3, 2014 | May 17, 2015 | Zaire ebolavirus isolate Ebola virus/H.sapiens- |
| | Leone | | | wt/SLE/2014/Makona-20141582, partial genome |
| AKG95624 | Sierra | Oct. 4, 2014 | May 17, 2015 | Zaire ebolavirus isolate Ebola virus/H.sapiens- |
| | Leone | | | wt/SLE/2014/Makona-20141643, partial genome |
| AKG95552 | Sierra | Oct. 5, 2014 | May 17, 2015 | Zaire ebolavirus isolate Ebola virus/H.sapiens- |
| | Leone | | | wt/SLE/2014/Makona-20141650, partial genome |
| AKG96074 | Sierra | Oct. 9, 2014 | May 17, 2015 | Zaire ebolavirus isolate Ebola virus/H.sapiens- |
| | Leone | | | wt/SLE/2014/Makona-20141960, partial genome |
| AKG96164 | Sierra | Oct. 10, 2014 | May 17, 2015 | Zaire ebolavirus isolate Ebola virus/H.sapiens- |
| | Leone | | | wt/SLE/2014/Makona-20141997, partial genome |
| AKG95993 | Sierra | Oct. 11, 2014 | May 17, 2015 | Zaire ebolavirus isolate Ebola virus/H.sapiens- |
| | Leone | | | wt/SLE/2014/Makona-20142065, partial genome |
| AKG95633 | Sierra | Oct. 12, 2014 | May 17, 2015 | Zaire ebolavirus isolate Ebola virus/H.sapiens- |
| | Leone | | | wt/SLE/2014/Makona-20142127, partial genome |
| AKG95885 | Sierra | Oct. 14, 2014 | May 17, 2015 | Zaire ebolavirus isolate Ebola virus/H.sapiens- |
| | Leone | | | wt/SLE/2014/Makona-20142260, partial genome |
| AKG95768 | Sierra | Oct. 16, 2014 | May 17, 2015 | Zaire ebolavirus isolate Ebola virus/H.sapiens- |
| | Leone | | | wt/SLE/2014/Makona-20142407, partial genome |
| AKG95813 | Sierra | Oct. 18, 2014 | May 17, 2015 | Zaire ebolavirus isolate Ebola virus/H.sapiens- |
| | Leone | | | wt/SLE/2014/Makona-20142417, partial genome |
| AKG95822 | Sierra | Oct. 19, 2014 | May 17, 2015 | Zaire ebolavirus isolate Ebola virus/H.sapiens- |
| | Leone | | | wt/SLE/2014/Makona-20142477, partial genome |
| AKG95561 | Sierra | Oct. 18, 2014 | May 17, 2015 | Zaire ebolavirus isolate Ebola virus/H.sapiens- |
| | Leone | | | wt/SLE/2014/Makona-20142551, partial genome |
| AKG96236 | Sierra | Oct. 23, 2014 | May 17, 2015 | Zaire ebolavirus isolate Ebola virus/H.sapiens- |
| | Leone | | | wt/SLE/2014/Makona-20142843, partial genome |
| AKG96245 | Sierra | Oct. 23, 2014 | May 17, 2015 | Zaire ebolavirus isolate Ebola virus/H.sapiens- |
| | Leone | | | wt/SLE/2014/Makona-20142856, partial genome |
| AKG95939 | Sierra | Oct. 24, 2014 | May 17, 2015 | Zaire ebolavirus isolate Ebola virus/H.sapiens- |
| | Leone | | | wt/SLE/2014/Makona-20142895, partial genome |
| AKG95975 | Sierra | Oct. 26, 2014 | May 17, 2015 | Zaire ebolavirus isolate Ebola virus/H.sapiens- |
| | Leone | | | wt/SLE/2014/Makona-20143018, partial genome |
| AKG96002 | Sierra | Oct. 25, 2014 | May 17, 2015 | Zaire ebolavirus isolate Ebola virus/H.sapiens- |
| | Leone | | | wt/SLE/2014/Makona-20143031, partial genome |
| AKG96092 | Sierra | Oct. 24, 2014 | May 17, 2015 | Zaire ebolavirus isolate Ebola virus/H.sapiens- |
| | Leone | | | wt/SLE/2014/Makona-20143036, partial genome |
| AKG95750 | Sierra | Oct. 25, 2014 | May 17, 2015 | Zaire ebolavirus isolate Ebola virus/H.sapiens- |
| | Leone | | | wt/SLE/2014/Makona-20143107, partial genome |
| AKG96020 | Sierra | Oct. 27, 2014 | May 17, 2015 | Zaire ebolavirus isolate Ebola virus/H.sapiens- |
| | Leone | | | wt/SLE/2014/Makona-20143164, partial genome |
| AKG96209 | Sierra | Oct. 28, 2014 | May 17, 2015 | Zaire ebolavirus isolate Ebola virus/H.sapiens- |
| | Leone | | | wt/SLE/2014/Makona-20143187, partial genome |
| AKG96065 | Sierra | Oct. 29, 2014 | May 17, 2015 | Zaire ebolavirus isolate Ebola virus/H.sapiens- |
| | Leone | | | wt/SLE/2014/Makona-20143317, partial genome |
| AKG95849 | Sierra | Oct. 30, 2014 | May 17, 2015 | Zaire ebolavirus isolate Ebola virus/H.sapiens- |
| | Leone | | | wt/SLE/2014/Makona-20143360, partial genome |
| AKG95759 | Sierra | Oct. 31, 2014 | May 17, 2015 | Zaire ebolavirus isolate Ebola virus/H.sapiens- |
| | Leone | | | wt/SLE/2014/Makona-20143415, partial genome |
| AKG95732 | Sierra | Nov. 1, 2014 | May 17, 2015 | Zaire ebolavirus isolate Ebola virus/H.sapiens- |
| | Leone | | | wt/SLE/2014/Makona-20143458, partial genome |
| AKG96263 | Sierra | Nov. 1, 2014 | May 17, 2015 | Zaire ebolavirus isolate Ebola virus/H.sapiens- |
| | Leone | | | wt/SLE/2014/Makona-20143466, partial genome |
| AKG95579 | Sierra | Nov. 1, 2014 | May 17, 2015 | Zaire ebolavirus isolate Ebola virus/H.sapiens- |
| | Leone | | | wt/SLE/2014/Makona-20143550, partial genome |
| AKG95804 | Sierra | Nov. 3, 2014 | May 17, 2015 | Zaire ebolavirus isolate Ebola virus/H.sapiens- |
| | Leone | | | wt/SLE/2014/Makona-20143648, partial genome |
| AKG95831 | Sierra | Nov. 3, 2014 | May 17, 2015 | Zaire ebolavirus isolate Ebola virus/H.sapiens- |
| | Leone | | | wt/SLE/2014/Makona-20143659, partial genome |
| AKG96155 | Sierra | Nov. 4, 2014 | May 17, 2015 | Zaire ebolavirus isolate Ebola virus/H.sapiens- |
| | Leone | | | wt/SLE/2014/Makona-20143716, partial genome |
| AKG95651 | Sierra | Nov. 5, 2014 | May 17, 2015 | Zaire ebolavirus isolate Ebola virus/H.sapiens- |
| | Leone | | | wt/SLE/2014/Makona-20143753, partial genome |
| AKG95840 | Sierra | Nov. 5, 2014 | May 17, 2015 | Zaire ebolavirus isolate Ebola virus/H.sapiens- |
| | Leone | | | wt/SLE/2014/Makona-20143796, partial genome |
| AKG95687 | Sierra | Nov. 6, 2014 | May 17, 2015 | Zaire ebolavirus isolate Ebola virus/H.sapiens- |
| | Leone | | | wt/SLE/2014/Makona-20143918, partial genome |
| AKG95903 | Sierra | Nov. 7, 2014 | May 17, 2015 | Zaire ebolavirus isolate Ebola virus/H.sapiens- |
| | Leone | | | wt/SLE/2014/Makona-20143938, partial genome |
| AKG95705 | Sierra | Nov. 7, 2014 | May 17, 2015 | Zaire ebolavirus isolate Ebola virus/H.sapiens- |
| | Leone | | | wt/SLE/2014/Makona-20143964, partial genome |
| AKG95669 | Sierra | Nov. 8, 2014 | May 17, 2015 | Zaire ebolavirus isolate Ebola virus/H.sapiens- |
| | Leone | | | wt/SLE/2014/Makona-20144192, partial genome |
| AKG95966 | Sierra | Nov. 12, 2014 | May 17, 2015 | Zaire ebolavirus isolate Ebola virus/H.sapiens- |
| | Leone | | | wt/SLE/2014/Makona-20144521, partial genome |
| AKG95957 | Sierra | Nov. 12, 2014 | May 17, 2015 | Zaire ebolavirus isolate Ebola virus/H.sapiens- |
| | Leone | | | wt/SLE/2014/Makona-20144610, partial genome |
| AKG96218 | Sierra | Nov. 15, 2014 | May 17, 2015 | Zaire ebolavirus isolate Ebola virus/H.sapiens- |
| | Leone | | | wt/SLE/2014/Makona-20144819, partial genome |
| AKG95714 | Sierra | Nov. 15, 2014 | May 17, 2015 | Zaire ebolavirus isolate Ebola virus/H.sapiens- |
| | Leone | | | wt/SLE/2014/Makona-20144820, partial genome |
| AKG95858 | Sierra | Nov. 14, 2014 | May 17, 2015 | Zaire ebolavirus isolate Ebola virus/H.sapiens- |
| | Leone | | | wt/SLE/2014/Makona-20144837, partial genome |
| AKG95606 | Sierra | Nov. 13, 2014 | May 17, 2015 | Zaire ebolavirus isolate Ebola virus/H.sapiens- |
| | Leone | | | wt/SLE/2014/Makona-20144865, partial genome |
| AKG96182 | Sierra | Nov. 25, 2014 | May 17, 2015 | Zaire ebolavirus isolate Ebola virus/H.sapiens- |
| | Leone | | | wt/SLE/2014/Makona-20145835, partial genome |
| AKG96137 | Sierra | Nov. 26, 2014 | May 17, 2015 | Zaire ebolavirus isolate Ebola virus/H.sapiens- |
| | Leone | | | wt/SLE/2014/Makona-20145853, partial genome |
| AKG95660 | Sierra | Nov. 24, 2014 | May 17, 2015 | Zaire ebolavirus isolate Ebola virus/H.sapiens- |
| | Leone | | | wt/SLE/2014/Makona-20146001, partial genome |
| AKG95543 | Sierra | Dec. 22, 2014 | May 17, 2015 | Zaire ebolavirus isolate Ebola virus/H.sapiens- |
| | Leone | | | wt/SLE/2014/Makona-20146553, partial genome |
| AKG96056 | Sierra | Dec. 26, 2014 | May 17, 2015 | Zaire ebolavirus isolate Ebola virus/H.sapiens- |
| | Leone | | | wt/SLE/2014/Makona-20146578, partial genome |
| AIE11810 | Sierra | May 25, 2014 | Jun. 30, 2014 | Zaire ebolavirus isolate Ebola virus/H.sapiens- |
| | Leone | | | wt/SLE/2014/Makona-EM095, complete genome |
| AIE11801 | Sierra | May 25, 2014 | Jun. 30, 2014 | Zaire ebolavirus isolate Ebola virus/H.sapiens- |
| | Leone | | | wt/SLE/2014/Makona-EM095B, complete |
| | | | | genome |
| AIE11819 | Sierra | May 26, 2014 | Jun. 30, 2014 | Zaire ebolavirus isolate Ebola virus/H.sapiens- |
| | Leone | | | wt/SLE/2014/Makona-EM096, complete genome |
| AIE11828 | Sierra | May 26, 2014 | Jun. 30, 2014 | Zaire ebolavirus isolate Ebola virus/H.sapiens- |
| | Leone | | | wt/SLE/2014/Makona-EM098, complete genome |
| AIG95888 | Sierra | Jun. 2, 2014 | Jul. 25, 2014 | Zaire ebolavirus isolate Ebola virus/H.sapiens- |
| | Leone | | | wt/SLE/2014/Makona-EM104, complete genome |
| AIG95897 | Sierra | Jun. 2, 2014 | Jul. 25, 2014 | Zaire ebolavirus isolate Ebola virus/H.sapiens- |
| | Leone | | | wt/SLE/2014/Makona-EM106, complete genome |
| AIG95906 | Sierra | Jun. 3, 2014 | Jul. 25, 2014 | Zaire ebolavirus isolate Ebola virus/H.sapiens- |
| | Leone | | | wt/SLE/2014/Makona-EM110, complete genome |
| AIG95915 | Sierra | Jun. 3, 2014 | Jul. 25, 2014 | Zaire ebolavirus isolate Ebola virus/H.sapiens- |
| | Leone | | | wt/SLE/2014/Makona-EM111, complete genome |
| AIG95924 | Sierra | Jun. 3, 2014 | Jul. 25, 2014 | Zaire ebolavirus isolate Ebola virus/H.sapiens- |
| | Leone | | | wt/SLE/2014/Makona-EM112, complete genome |
| AIG95933 | Sierra | Jun. 3, 2014 | Jul. 25, 2014 | Zaire ebolavirus isolate Ebola virus/H.sapiens- |
| | Leone | | | wt/SLE/2014/Makona-EM113, complete genome |
| AIG95942 | Sierra | Jun. 3, 2014 | Jul. 25, 2014 | Zaire ebolavirus isolate Ebola virus/H.sapiens- |
| | Leone | | | wt/SLE/2014/Makona-EM115, complete genome |
| AIG95951 | Sierra | Jun. 3, 2014 | Jul. 25, 2014 | Zaire ebolavirus isolate Ebola virus/H.sapiens- |
| | Leone | | | wt/SLE/2014/Makona-EM119, complete genome |
| AIG95960 | Sierra | Jun. 3, 2014 | Jul. 25, 2014 | Zaire ebolavirus isolate Ebola virus/H.sapiens- |
| | Leone | | | wt/SLE/2014/Makona-EM120, complete genome |
| AIG95969 | Sierra | Jun. 4, 2014 | Jul. 25, 2014 | Zaire ebolavirus isolate Ebola virus/H.sapiens- |
| | Leone | | | wt/SLE/2014/Makona-EM121, complete genome |
| AIG95978 | Sierra | Jun. 4, 2014 | Jul. 25, 2014 | Zaire ebolavirus isolate Ebola virus/H.sapiens- |
| | Leone | | | wt/SLE/2014/Makona-EM124.1, complete |
| | | | | genome |
| AIG95987 | Sierra | Jun. 6, 2014 | Jul. 25, 2014 | Zaire ebolavirus isolate Ebola virus/H.sapiens- |
| | Leone | | | wt/SLE/2014/Makona-EM124.2, complete |
| | | | | genome |
| AIG95996 | Sierra | Jun. 8, 2014 | Jul. 25, 2014 | Zaire ebolavirus isolate Ebola virus/H.sapiens- |
| | Leone | | | wt/SLE/2014/Makona-EM124.3, complete |
| | | | | genome |
| AIG96005 | Sierra | Jun. 9, 2014 | Jul. 25, 2014 | Zaire ebolavirus isolate Ebola virus/H.sapiens- |
| | Leone | | | wt/SLE/2014/Makona-EM124.4, complete |
| | | | | genome |
| AKI84076 | Sierra | Jun. 13, 2014 | Jun. 12, 2015 | Zaire ebolavirus isolate Ebola virus/H.sapiens- |
| | Leone | | | wt/SLE/2014/Makona-EM_079983, partial |
| | | | | genome |
| AKI84085 | Sierra | Jun. 14, 2014 | Jun. 12, 2015 | Zaire ebolavirus isolate Ebola virus/H.sapiens- |
| | Leone | | | wt/SLE/2014/Makona-EM_080003, partial |
| | | | | genome |
| AKI84094 | Sierra | Jun. 15, 2014 | Jun. 12, 2015 | Zaire ebolavirus isolate Ebola virus/H.sapiens- |
| | Leone | | | wt/SLE/2014/Makona-EM_080011, partial |
| | | | | genome |
| AKI84157 | Sierra | Jun. 24, 2014 | Jun. 12, 2015 | Zaire ebolavirus isolate Ebola virus/H.sapiens- |
| | Leone | | | wt/SLE/2014/Makona-EM_080132, partial |
| | | | | genome |
| AKI84175 | Sierra | Jun. 26, 2014 | Jun. 12, 2015 | Zaire ebolavirus isolate Ebola virus/H.sapiens- |
| | Leone | | | wt/SLE/2014/Makona-EM_080165, partial |
| | | | | genome |
| AKI84229 | Sierra | Jul. 12, 2014 | Jun. 12, 2015 | Zaire ebolavirus isolate Ebola virus/H.sapiens- |
| | Leone | | | wt/SLE/2014/Makona-EM_080265, partial |
| | | | | genome |
| AIE11837 | Sierra | May 27, 2014 | Jun. 30, 2014 | Zaire ebolavirus isolate Ebola virus/H.sapiens- |
| | Leone | | | wt/SLE/2014/Makona-G3670.1, complete |
| | | | | genome |
| AIE11846 | Sierra | May 27, 2014 | Jun. 30, 2014 | Zaire ebolavirus isolate Ebola virus/H.sapiens- |
| | Leone | | | wt/SLE/2014/Makona-G3676.1, complete |
| | | | | genome |
| AIE11855 | Sierra | Jun. 6, 2014 | Jun. 30, 2014 | Zaire ebolavirus isolate Ebola virus/H.sapiens- |
| | Leone | | | wt/SLE/2014/Makona-G3676.2, complete |
| | | | | genome |
| AIE11864 | Sierra | May 26, 2014 | Jun. 30, 2014 | Zaire ebolavirus isolate Ebola virus/H.sapiens- |
| | Leone | | | wt/SLE/2014/Makona-G3677.1, complete |
| | | | | genome |
| AIE11873 | Sierra | May 27, 2014 | Jun. 30, 2014 | Zaire ebolavirus isolate Ebola virus/H.sapiens- |
| | Leone | | | wt/SLE/2014/Makona-G3677.2, complete |
| | | | | genome |
| AIE11882 | Sierra | May 28, 2014 | Jun. 30, 2014 | Zaire ebolavirus isolate Ebola virus/H.sapiens- |
| | Leone | | | wt/SLE/2014/Makona-G3679.1, complete |
| | | | | genome |
| AIE11891 | Sierra | May 28, 2014 | Jun. 30, 2014 | Zaire ebolavirus isolate Ebola virus/H.sapiens- |
| | Leone | | | wt/SLE/2014/Makona-G3680.1, complete |
| | | | | genome |
| AIE11900 | Sierra | May 28, 2014 | Jun. 30, 2014 | Zaire ebolavirus isolate Ebola virus/H.sapiens- |
| | Leone | | | wt/SLE/2014/Makona-G3682.1, complete |
| | | | | genome |
| AIE11909 | Sierra | May 28, 2014 | Jun. 30, 2014 | Zaire ebolavirus isolate Ebola virus/H.sapiens- |
| | Leone | | | wt/SLE/2014/Makona-G3683.1, complete |
| | | | | genome |
| AIE11918 | Sierra | May 28, 2014 | Jun. 30, 2014 | Zaire ebolavirus isolate Ebola virus/H.sapiens- |
| | Leone | | | wt/SLE/2014/Makona-G3686.1, complete |
| | | | | genome |
| AIE11927 | Sierra | May 28, 2014 | Jun. 30, 2014 | Zaire ebolavirus isolate Ebola virus/H.sapiens- |
| | Leone | | | wt/SLE/2014/Makona-G3687.1, complete |
| | | | | genome |
| AIG96014 | Sierra | May 31, 2014 | Jul. 25, 2014 | Zaire ebolavirus isolate Ebola virus/H.sapiens- |
| | Leone | | | wt/SLE/2014/Makona-G3707, complete genome |
| AIG96023 | Sierra | Jun. 9, 2014 | Jul. 25, 2014 | Zaire ebolavirus isolate Ebola virus/H.sapiens- |
| | Leone | | | wt/SLE/2014/Makona-G3713.2, complete |
| | | | | genome |
| AIG96032 | Sierra | Jun. 11, 2014 | Jul. 25, 2014 | Zaire ebolavirus isolate Ebola virus/H.sapiens- |
| | Leone | | | wt/SLE/2014/Makona-G3713.3, complete |
| | | | | genome |
| AIG96041 | Sierra | Jun. 13, 2014 | Jul. 25, 2014 | Zaire ebolavirus isolate Ebola virus/H.sapiens- |
| | Leone | | | wt/SLE/2014/Makona-G3713.4, complete |
| | | | | genome |
| AIG96050 | Sierra | Jun. 5, 2014 | Jul. 25, 2014 | Zaire ebolavirus isolate Ebola virus/H.sapiens- |
| | Leone | | | wt/SLE/2014/Makona-G3724, complete genome |
| AIG96059 | Sierra | Jun. 7, 2014 | Jul. 25, 2014 | Zaire ebolavirus isolate Ebola virus/H.sapiens- |
| | Leone | | | wt/SLE/2014/Makona-G3729, complete genome |
| AIG96068 | Sierra | Jun. 7, 2014 | Jul. 25, 2014 | Zaire ebolavirus isolate Ebola virus/H.sapiens- |
| | Leone | | | wt/SLE/2014/Makona-G3734.1, complete |
| | | | | genome |
| AIG96077 | Sierra | Jun. 7, 2014 | Jul. 25, 2014 | Zaire ebolavirus isolate Ebola virus/H.sapiens- |
| | Leone | | | wt/SLE/2014/Makona-G3735.1, complete |
| | | | | genome |
| AIG96086 | Sierra | Jun. 9, 2014 | Jul. 25, 2014 | Zaire ebolavirus isolate Ebola virus/H.sapiens- |
| | Leone | | | wt/SLE/2014/Makona-G3735.2, complete |
| | | | | genome |
| AIG96095 | Sierra | Jun. 10, 2014 | Jul. 25, 2014 | Zaire ebolavirus isolate Ebola virus/H.sapiens- |
| | Leone | | | wt/SLE/2014/Makona-G3750.1, complete |
| | | | | genome |
| AIG96104 | Sierra | Jun. 12, 2014 | Jul. 25, 2014 | Zaire ebolavirus isolate Ebola virus/H.sapiens- |
| | Leone | | | wt/SLE/2014/Makona-G3750.2, complete |
| | | | | genome |
| AIG96113 | Sierra | Jun. 14, 2014 | Jul. 25, 2014 | Zaire ebolavirus isolate Ebola virus/H.sapiens- |
| | Leone | | | wt/SLE/2014/Makona-G3750.3, complete |
| | | | | genome |
| AIG96122 | Sierra | Jun. 10, 2014 | Jul. 25, 2014 | Zaire ebolavirus isolate Ebola virus/H.sapiens- |
| | Leone | | | wt/SLE/2014/Makona-G3752, complete genome |
| AIG96131 | Sierra | Jun. 11, 2014 | Jul. 25, 2014 | Zaire ebolavirus isolate Ebola virus/H.sapiens- |
| | Leone | | | wt/SLE/2014/Makona-G3758, complete genome |
| AIG96140 | Sierra | Jun. 12, 2014 | Jul. 25, 2014 | Zaire ebolavirus isolate Ebola virus/H.sapiens- |
| | Leone | | | wt/SLE/2014/Makona-G3764, complete genome |
| AIG96149 | Sierra | Jun. 14, 2014 | Jul. 25, 2014 | Zaire ebolavirus isolate Ebola virus/H.sapiens- |
| | Leone | | | wt/SLE/2014/Makona-G3765.2, complete |
| | | | | genome |
| AIG96158 | Sierra | Jun. 12, 2014 | Jul. 25, 2014 | Zaire ebolavirus isolate Ebola virus/H.sapiens- |
| | Leone | | | wt/SLE/2014/Makona-G3769.1, complete |
| | | | | genome |
| AIG96167 | Sierra | Jun. 13, 2014 | Jul. 25, 2014 | Zaire ebolavirus isolate Ebola virus/H.sapiens- |
| | Leone | | | wt/SLE/2014/Makona-G3769.2, complete |
| | | | | genome |
| AIG96176 | Sierra | Jun. 15, 2014 | Jul. 25, 2014 | Zaire ebolavirus isolate Ebola virus/H.sapiens- |
| | Leone | | | wt/SLE/2014/Makona-G3769.3, complete |
| | | | | genome |
| AIG96185 | Sierra | Jun. 16, 2014 | Jul. 25, 2014 | Zaire ebolavirus isolate Ebola virus/H.sapiens- |
| | Leone | | | wt/SLE/2014/Makona-G3769.4, complete |
| | | | | genome |
| AIG96194 | Sierra | Jun. 12, 2014 | Jul. 25, 2014 | Zaire ebolavirus isolate Ebola virus/H.sapiens- |
| | Leone | | | wt/SLE/2014/Makona-G3770.1, complete |
| | | | | genome |
| AIG96203 | Sierra | Jun. 14, 2014 | Jul. 25, 2014 | Zaire ebolavirus isolate Ebola virus/H.sapiens- |
| | Leone | | | wt/SLE/2014/Makona-G3770.2, complete |
| | | | | genome |
| AIG96212 | Sierra | Jun. 12, 2014 | Jul. 25, 2014 | Zaire ebolavirus isolate Ebola virus/H.sapiens- |
| | Leone | | | wt/SLE/2014/Makona-G3771, complete genome |
| AIG96221 | Sierra | Jun. 14, 2014 | Jul. 25, 2014 | Zaire ebolavirus isolate Ebola virus/H.sapiens- |
| | Leone | | | wt/SLE/2014/Makona-G3782, complete genome |
| AIG96230 | Sierra | Jun. 14, 2014 | Jul. 25, 2014 | Zaire ebolavirus isolate Ebola virus/H.sapiens- |
| | Leone | | | wt/SLE/2014/Makona-G3786, complete genome |
| AIG96239 | Sierra | Jun. 14, 2014 | Jul. 25, 2014 | Zaire ebolavirus isolate Ebola virus/H.sapiens- |
| | Leone | | | wt/SLE/2014/Makona-G3787, complete genome |
| AIG96248 | Sierra | Jun. 14, 2014 | Jul. 25, 2014 | Zaire ebolavirus isolate Ebola virus/H.sapiens- |
| | Leone | | | wt/SLE/2014/Makona-G3788, complete genome |
| AIG96257 | Sierra | Jun. 14, 2014 | Jul. 25, 2014 | Zaire ebolavirus isolate Ebola virus/H.sapiens- |
| | Leone | | | wt/SLE/2014/Makona-G3789.1, complete |
| | | | | genome |
| AIG96266 | Sierra | Jun. 15, 2014 | Jul. 25, 2014 | Zaire ebolavirus isolate Ebola virus/H.sapiens- |
| | Leone | | | wt/SLE/2014/Makona-G3795, complete genome |
| AIG96275 | Sierra | Jun. 15, 2014 | Jul. 25, 2014 | Zaire ebolavirus isolate Ebola virus/H.sapiens- |
| | Leone | | | wt/SLE/2014/Makona-G3796, complete genome |
| AIG96284 | Sierra | Jun. 15, 2014 | Jul. 25, 2014 | Zaire ebolavirus isolate Ebola virus/H.sapiens- |
| | Leone | | | wt/SLE/2014/Makona-G3798, complete genome |
| AIG96293 | Sierra | Jun. 15, 2014 | Jul. 25, 2014 | Zaire ebolavirus isolate Ebola virus/H.sapiens- |
| | Leone | | | wt/SLE/2014/Makona-G3799, complete genome |
| AIG96302 | Sierra | Jun. 15, 2014 | Jul. 25, 2014 | Zaire ebolavirus isolate Ebola virus/H.sapiens- |
| | Leone | | | wt/SLE/2014/Makona-G3800, complete genome |
| AIG96311 | Sierra | Jun. 15, 2014 | Jul. 25, 2014 | Zaire ebolavirus isolate Ebola virus/H.sapiens- |
| | Leone | | | wt/SLE/2014/Makona-G3805.1, complete |
| | | | | genome |
| AIG96320 | Sierra | Jun. 20, 2014 | Jul. 25, 2014 | Zaire ebolavirus isolate Ebola virus/H.sapiens- |
| | Leone | | | wt/SLE/2014/Makona-G3805.2, complete |
| | | | | genome |
| AIG96329 | Sierra | Jun. 15, 2014 | Jul. 25, 2014 | Zaire ebolavirus isolate Ebola virus/H.sapiens- |
| | Leone | | | wt/SLE/2014/Makona-G3807, complete genome |
| AIG96338 | Sierra | Jun. 15, 2014 | Jul. 25, 2014 | Zaire ebolavirus isolate Ebola virus/H.sapiens- |
| | Leone | | | wt/SLE/2014/Makona-G3808, complete genome |
| AIG96347 | Sierra | Jun. 15, 2014 | Jul. 25, 2014 | Zaire ebolavirus isolate Ebola virus/H.sapiens- |
| | Leone | | | wt/SLE/2014/Makona-G3809, complete genome |
| AIG96356 | Sierra | Jun. 15, 2014 | Jul. 25, 2014 | Zaire ebolavirus isolate Ebola virus/H.sapiens- |
| | Leone | | | wt/SLE/2014/Makona-G3810.1, complete |
| | | | | genome |
| AIG96365 | Sierra | Jun. 17, 2014 | Jul. 25, 2014 | Zaire ebolavirus isolate Ebola virus/H.sapiens- |
| | Leone | | | wt/SLE/2014/Makona-G3810.2, complete |
| | | | | genome |
| AIG96374 | Sierra | Jun. 15, 2014 | Jul. 25, 2014 | Zaire ebolavirus isolate Ebola virus/H.sapiens- |
| | Leone | | | wt/SLE/2014/Makona-G3814, complete genome |
| AIG96383 | Sierra | Jun. 15, 2014 | Jul. 25, 2014 | Zaire ebolavirus isolate Ebola virus/H.sapiens- |
| | Leone | | | wt/SLE/2014/Makona-G3816, complete genome |
| AIG96392 | Sierra | Jun. 15, 2014 | Jul. 25, 2014 | Zaire ebolavirus isolate Ebola virus/H.sapiens- |
| | Leone | | | wt/SLE/2014/Makona-G3817, complete genome |
| AIG96401 | Sierra | Jun. 15, 2014 | Jul. 25, 2014 | Zaire ebolavirus isolate Ebola virus/H.sapiens- |
| | Leone | | | wt/SLE/2014/Makona-G3818, complete genome |
| AIG96410 | Sierra | Jun. 15, 2014 | Jul. 25, 2014 | Zaire ebolavirus isolate Ebola virus/H.sapiens- |
| | Leone | | | wt/SLE/2014/Makona-G3819, complete genome |
| AIG96419 | Sierra | Jun. 15, 2014 | Jul. 25, 2014 | Zaire ebolavirus isolate Ebola virus/H.sapiens- |
| | Leone | | | wt/SLE/2014/Makona-G3820, complete genome |
| AIG96428 | Sierra | Jun. 15, 2014 | Jul. 25, 2014 | Zaire ebolavirus isolate Ebola virus/H.sapiens- |
| | Leone | | | wt/SLE/2014/Makona-G3821, complete genome |
| AIG96437 | Sierra | Jun. 15, 2014 | Jul. 25, 2014 | Zaire ebolavirus isolate Ebola virus/H.sapiens- |
| | Leone | | | wt/SLE/2014/Makona-G3822, complete genome |
| AIG96446 | Sierra | Jun. 15, 2014 | Jul. 25, 2014 | Zaire ebolavirus isolate Ebola virus/H.sapiens- |
| | Leone | | | wt/SLE/2014/Makona-G3823, complete genome |
| AIG96455 | Sierra | Jun. 16, 2014 | Jul. 25, 2014 | Zaire ebolavirus isolate Ebola virus/H.sapiens- |
| | Leone | | | wt/SLE/2014/Makona-G3825.1, complete |
| | | | | genome |
| AIG96464 | Sierra | Jun. 17, 2014 | Jul. 25, 2014 | Zaire ebolavirus isolate Ebola virus/H.sapiens- |
| | Leone | | | wt/SLE/2014/Makona-G3825.2, complete |
| | | | | genome |
| AIG96473 | Sierra | Jun. 16, 2014 | Jul. 25, 2014 | Zaire ebolavirus isolate Ebola virus/H.sapiens- |
| | Leone | | | wt/SLE/2014/Makona-G3826, complete genome |
| AIG96482 | Sierra | Jun. 16, 2014 | Jul. 25, 2014 | Zaire ebolavirus isolate Ebola virus/H.sapiens- |
| | Leone | | | wt/SLE/2014/Makona-G3827, complete genome |
| AIG96491 | Sierra | Jun. 16, 2014 | Jul. 25, 2014 | Zaire ebolavirus isolate Ebola virus/H.sapiens- |
| | Leone | | | wt/SLE/2014/Makona-G3829, complete genome |
| AIG96500 | Sierra | Jun. 16, 2014 | Jul. 25, 2014 | Zaire ebolavirus isolate Ebola virus/H.sapiens- |
| | Leone | | | wt/SLE/2014/Makona-G3831, complete genome |
| AIG96509 | Sierra | Jun. 17, 2014 | Jul. 25, 2014 | Zaire ebolavirus isolate Ebola virus/H.sapiens- |
| | Leone | | | wt/SLE/2014/Makona-G3834, complete genome |
| AIG96518 | Sierra | Jun. 17, 2014 | Jul. 25, 2014 | Zaire ebolavirus isolate Ebola virus/H.sapiens- |
| | Leone | | | wt/SLE/2014/Makona-G3838, complete genome |
| AKC35925 | Sierra | Jun. 16, 2014 | Apr. 19, 2015 | Zaire ebolavirus isolate Ebola virus/H.sapiens- |
| | Leone | | | wt/SLE/2014/Makona-G3838.2, partial genome |
| AIG96527 | Sierra | Jun. 17, 2014 | Jul. 25, 2014 | Zaire ebolavirus isolate Ebola virus/H.sapiens- |
| | Leone | | | wt/SLE/2014/Makona-G3840, complete genome |
| AIG96536 | Sierra | Jun. 17, 2014 | Jul. 25, 2014 | Zaire ebolavirus isolate Ebola virus/H.sapiens- |
| | Leone | | | wt/SLE/2014/Makona-G3841, complete genome |
| AIG96545 | Sierra | Jun. 18, 2014 | Jul. 25, 2014 | Zaire ebolavirus isolate Ebola virus/H.sapiens- |
| | Leone | | | wt/SLE/2014/Makona-G3845, complete genome |
| AKC35934 | Sierra | Jun. 19, 2014 | Apr. 19, 2015 | Zaire ebolavirus isolate Ebola virus/H.sapiens- |
| | Leone | | | wt/SLE/2014/Makona-G3845.2, partial genome |
| AIG96554 | Sierra | Jun. 18, 2014 | Jul. 25, 2014 | Zaire ebolavirus isolate Ebola virus/H.sapiens- |
| | Leone | | | wt/SLE/2014/Makona-G3846, complete genome |
| AIG96563 | Sierra | Jun. 18, 2014 | Jul. 25, 2014 | Zaire ebolavirus isolate Ebola virus/H.sapiens- |
| | Leone | | | wt/SLE/2014/Makona-G3848, complete genome |
| AIG96572 | Sierra | Jun. 18, 2014 | Jul. 25, 2014 | Zaire ebolavirus isolate Ebola virus/H.sapiens- |
| | Leone | | | wt/SLE/2014/Makona-G3850, complete genome |
| AIG96581 | Sierra | Jun. 18, 2014 | Jul. 25, 2014 | Zaire ebolavirus isolate Ebola virus/H.sapiens- |
| | Leone | | | wt/SLE/2014/Makona-G3851, complete genome |
| AKC35943 | Sierra | Jun. 18, 2014 | Apr. 19, 2015 | Zaire ebolavirus isolate Ebola virus/H.sapiens- |
| | Leone | | | wt/SLE/2014/Makona-G3851.2, partial genome |
| AKC35952 | Sierra | Jun. 17, 2014 | Apr. 19, 2015 | Zaire ebolavirus isolate Ebola virus/H.sapiens- |
| | Leone | | | wt/SLE/2014/Makona-G3855.2, partial genome |
| AIG96590 | Sierra | Jun. 18, 2014 | Jul. 25, 2014 | Zaire ebolavirus isolate Ebola virus/H.sapiens- |
| | Leone | | | wt/SLE/2014/Makona-G3856.1, complete |
| | | | | genome |
| AIG96599 | Sierra | Jun. 20, 2014 | Jul. 25, 2014 | Zaire ebolavirus isolate Ebola virus/H.sapiens- |
| | Leone | | | wt/SLE/2014/Makona-G3856.3, complete |
| | | | | genome |
| AIG96608 | Sierra | Jun. 18, 2014 | Jul. 25, 2014 | Zaire ebolavirus isolate Ebola virus/H.sapiens- |
| | Leone | | | wt/SLE/2014/Makona-G3857, complete genome |
| AKA43781 | Sierra | | Apr. 1, 2015 | Zaire ebolavirus isolate Ebola virus/H.sapiens- |
| | Leone | | | wt/SLE/2014/Makona-G3864.1, complete |
| | | | | genome |
| AKC35961 | Sierra | Jun. 19, 2014 | Apr. 19, 2015 | Zaire ebolavirus isolate Ebola virus/H.sapiens- |
| | Leone | | | wt/SLE/2014/Makona-G3886.1, partial genome |
| AKC35970 | Sierra | Jun. 19, 2014 | Apr. 19, 2015 | Zaire ebolavirus isolate Ebola virus/H.sapiens- |
| | Leone | | | wt/SLE/2014/Makona-G3889.1, partial genome |
| AKC35979 | Sierra | Jun. 21, 2014 | Apr. 19, 2015 | Zaire ebolavirus isolate Ebola virus/H.sapiens- |
| | Leone | | | wt/SLE/2014/Makona-G3913.1, partial genome |
| AKC35988 | Sierra | Jun. 21, 2014 | Apr. 19, 2015 | Zaire ebolavirus isolate Ebola virus/H.sapiens- |
| | Leone | | | wt/SLE/2014/Makona-G3917.1, partial genome |
| AKC35997 | Sierra | Jun. 22, 2014 | Apr. 19, 2015 | Zaire ebolavirus isolate Ebola virus/H.sapiens- |
| | Leone | | | wt/SLE/2014/Makona-G3926.2, partial genome |
| AKC36006 | Sierra | Jun. 24, 2014 | Apr. 19, 2015 | Zaire ebolavirus isolate Ebola virus/H.sapiens- |
| | Leone | | | wt/SLE/2014/Makona-G3949.1, partial genome |
| AKC36015 | Sierra | Jun. 24, 2014 | Apr. 19, 2015 | Zaire ebolavirus isolate Ebola virus/H.sapiens- |
| | Leone | | | wt/SLE/2014/Makona-G3950.1, partial genome |
| AKC36024 | Sierra | Jun. 25, 2014 | Apr. 19, 2015 | Zaire ebolavirus isolate Ebola virus/H.sapiens- |
| | Leone | | | wt/SLE/2014/Makona-G3952.1, partial genome |
| AKC36033 | Sierra | Jun. 24, 2014 | Apr. 19, 2015 | Zaire ebolavirus isolate Ebola virus/H.sapiens- |
| | Leone | | | wt/SLE/2014/Makona-G3972.1, partial genome |
| AKC36042 | Sierra | Jul. 5, 2014 | Apr. 19, 2015 | Zaire ebolavirus isolate Ebola virus/H.sapiens- |
| | Leone | | | wt/SLE/2014/Makona-G4132.1, partial genome |
| AKC36051 | Sierra | Jul. 4, 2014 | Apr. 19, 2015 | Zaire ebolavirus isolate Ebola virus/H.sapiens- |
| | Leone | | | wt/SLE/2014/Makona-G4133.1, partial genome |
| AKC36060 | Sierra | Jul. 6, 2014 | Apr. 19, 2015 | Zaire ebolavirus isolate Ebola virus/H.sapiens- |
| | Leone | | | wt/SLE/2014/Makona-G4151.1, partial genome |
| AKC36069 | Sierra | Jul. 7, 2014 | Apr. 19, 2015 | Zaire ebolavirus isolate Ebola virus/H.sapiens- |
| | Leone | | | wt/SLE/2014/Makona-G4190.1, partial genome |
| AKC36078 | Sierra | Jul. 8, 2014 | Apr. 19, 2015 | Zaire ebolavirus isolate Ebola virus/H.sapiens- |
| | Leone | | | wt/SLE/2014/Makona-G4200.1, partial genome |
| AKC36087 | Sierra | Jul. 8, 2014 | Apr. 19, 2015 | Zaire ebolavirus isolate Ebola virus/H.sapiens- |
| | Leone | | | wt/SLE/2014/Makona-G4217.1, partial genome |
| AKC36096 | Sierra | Jul. 9, 2014 | Apr. 19, 2015 | Zaire ebolavirus isolate Ebola virus/H.sapiens- |
| | Leone | | | wt/SLE/2014/Makona-G4221.1, partial genome |
| AKC36105 | Sierra | Jul. 11, 2014 | Apr. 19, 2015 | Zaire ebolavirus isolate Ebola virus/H.sapiens- |
| | Leone | | | wt/SLE/2014/Makona-G4235.1, partial genome |
| AKC36114 | Sierra | Jul. 10, 2014 | Apr. 19, 2015 | Zaire ebolavirus isolate Ebola virus/H.sapiens- |
| | Leone | | | wt/SLE/2014/Makona-G4236.1, partial genome |
| AKC36123 | Sierra | Jul. 11, 2014 | Apr. 19, 2015 | Zaire ebolavirus isolate Ebola virus/H.sapiens- |
| | Leone | | | wt/SLE/2014/Makona-G4250.1, partial genome |
| AKC36132 | Sierra | Jul. 11, 2014 | Apr. 19, 2015 | Zaire ebolavirus isolate Ebola virus/H.sapiens- |
| | Leone | | | wt/SLE/2014/Makona-G4251.1, partial genome |
| AKC36141 | Sierra | Jul. 11, 2014 | Apr. 19, 2015 | Zaire ebolavirus isolate Ebola virus/H.sapiens- |
| | Leone | | | wt/SLE/2014/Makona-G4252.1, partial genome |
| AKC36150 | Sierra | Jul. 11, 2014 | Apr. 19, 2015 | Zaire ebolavirus isolate Ebola virus/H.sapiens- |
| | Leone | | | wt/SLE/2014/Makona-G4254.1, partial genome |
| AKC36159 | Sierra | Jul. 11, 2014 | Apr. 19, 2015 | Zaire ebolavirus isolate Ebola virus/H.sapiens- |
| | Leone | | | wt/SLE/2014/Makona-G4255.1, partial genome |
| AKC36168 | Sierra | Jul. 11, 2014 | Apr. 19, 2015 | Zaire ebolavirus isolate Ebola virus/H.sapiens- |
| | Leone | | | wt/SLE/2014/Makona-G4263.1, partial genome |
| AKC36177 | Sierra | Jul. 11, 2014 | Apr. 19, 2015 | Zaire ebolavirus isolate Ebola virus/H.sapiens- |
| | Leone | | | wt/SLE/2014/Makona-G4264.1, partial genome |
| AKC36186 | Sierra | Jul. 12, 2014 | Apr. 19, 2015 | Zaire ebolavirus isolate Ebola virus/H.sapiens- |
| | Leone | | | wt/SLE/2014/Makona-G4299.1, partial genome |
| AKC36195 | Sierra | Jul. 12, 2014 | Apr. 19, 2015 | Zaire ebolavirus isolate Ebola virus/H.sapiens- |
| | Leone | | | wt/SLE/2014/Makona-G4312.2, partial genome |
| AKC36204 | Sierra | Jul. 13, 2014 | Apr. 19, 2015 | Zaire ebolavirus isolate Ebola virus/H.sapiens- |
| | Leone | | | wt/SLE/2014/Makona-G4316.1, partial genome |
| AKC36213 | Sierra | Jul. 14, 2014 | Apr. 19, 2015 | Zaire ebolavirus isolate Ebola virus/H.sapiens- |
| | Leone | | | wt/SLE/2014/Makona-G4323.2, partial genome |
| AKC36222 | Sierra | Jul. 14, 2014 | Apr. 19, 2015 | Zaire ebolavirus isolate Ebola virus/H.sapiens- |
| | Leone | | | wt/SLE/2014/Makona-G4324.1, partial genome |
| AKC36231 | Sierra | Jul. 14, 2014 | Apr. 19, 2015 | Zaire ebolavirus isolate Ebola virus/H.sapiens- |
| | Leone | | | wt/SLE/2014/Makona-G4325.1, partial genome |
| AKC36240 | Sierra | Jul. 14, 2014 | Apr. 19, 2015 | Zaire ebolavirus isolate Ebola virus/H.sapiens- |
| | Leone | | | wt/SLE/2014/Makona-G4329.1, partial genome |
| AKC36249 | Sierra | Jul. 13, 2014 | Apr. 19, 2015 | Zaire ebolavirus isolate Ebola virus/H.sapiens- |
| | Leone | | | wt/SLE/2014/Makona-G4333.1, partial genome |
| AKC36258 | Sierra | Jul. 14, 2014 | Apr. 19, 2015 | Zaire ebolavirus isolate Ebola virus/H.sapiens- |
| | Leone | | | wt/SLE/2014/Makona-G4334.1, partial genome |
| AKC36267 | Sierra | Jul. 14, 2014 | Apr. 19, 2015 | Zaire ebolavirus isolate Ebola virus/H.sapiens- |
| | Leone | | | wt/SLE/2014/Makona-G4337.1, partial genome |
| AKC36276 | Sierra | Jul. 18, 2014 | Apr. 19, 2015 | Zaire ebolavirus isolate Ebola virus/H.sapiens- |
| | Leone | | | wt/SLE/2014/Makona-G4345.1, partial genome |
| AKC36285 | Sierra | Jul. 15, 2014 | Apr. 19, 2015 | Zaire ebolavirus isolate Ebola virus/H.sapiens- |
| | Leone | | | wt/SLE/2014/Makona-G4347.1, partial genome |
| AKC36294 | Sierra | Jul. 9, 2014 | Apr. 19, 2015 | Zaire ebolavirus isolate Ebola virus/H.sapiens- |
| | Leone | | | wt/SLE/2014/Makona-G4348.1, partial genome |
| AKC36303 | Sierra | Jul. 14, 2014 | Apr. 19, 2015 | Zaire ebolavirus isolate Ebola virus/H.sapiens- |
| | Leone | | | wt/SLE/2014/Makona-G4350.1, partial genome |
| AKC36312 | Sierra | Jul. 15, 2014 | Apr. 19, 2015 | Zaire ebolavirus isolate Ebola virus/H.sapiens- |
| | Leone | | | wt/SLE/2014/Makona-G4380.1, partial genome |
| AKC36321 | Sierra | Jul. 16, 2014 | Apr. 19, 2015 | Zaire ebolavirus isolate Ebola virus/H.sapiens- |
| | Leone | | | wt/SLE/2014/Makona-G4382.1, partial genome |
| AKC36330 | Sierra | Jul. 16, 2014 | Apr. 19, 2015 | Zaire ebolavirus isolate Ebola virus/H.sapiens- |
| | Leone | | | wt/SLE/2014/Makona-G4389.1, partial genome |
| AKC36339 | Sierra | Jul. 18, 2014 | Apr. 19, 2015 | Zaire ebolavirus isolate Ebola virus/H.sapiens- |
| | Leone | | | wt/SLE/2014/Makona-G4406.1, partial genome |
| AKC36348 | Sierra | Jul. 18, 2014 | Apr. 19, 2015 | Zaire ebolavirus isolate Ebola virus/H.sapiens- |
| | Leone | | | wt/SLE/2014/Makona-G4415.1, partial genome |
| AKC36357 | Sierra | Jul. 18, 2014 | Apr. 19, 2015 | Zaire ebolavirus isolate Ebola virus/H.sapiens- |
| | Leone | | | wt/SLE/2014/Makona-G4416.1, partial genome |
| AKC36366 | Sierra | Jul. 19, 2014 | Apr. 19, 2015 | Zaire ebolavirus isolate Ebola virus/H.sapiens- |
| | Leone | | | wt/SLE/2014/Makona-G4419.1, partial genome |
| AKC36375 | Sierra | Jul. 19, 2014 | Apr. 19, 2015 | Zaire ebolavirus isolate Ebola virus/H.sapiens- |
| | Leone | | | wt/SLE/2014/Makona-G4422.1, partial genome |
| AKC36384 | Sierra | Jul. 19, 2014 | Apr. 19, 2015 | Zaire ebolavirus isolate Ebola virus/H.sapiens- |
| | Leone | | | wt/SLE/2014/Makona-G4423.1, partial genome |
| AKC36393 | Sierra | Jul. 19, 2014 | Apr. 19, 2015 | Zaire ebolavirus isolate Ebola virus/H.sapiens- |
| | Leone | | | wt/SLE/2014/Makona-G4424.1, partial genome |
| AKC36402 | Sierra | Jul. 20, 2014 | Apr. 19, 2015 | Zaire ebolavirus isolate Ebola virus/H.sapiens- |
| | Leone | | | wt/SLE/2014/Makona-G4431.1, partial genome |
| AKC36411 | Sierra | Jul. 20, 2014 | Apr. 19, 2015 | Zaire ebolavirus isolate Ebola virus/H.sapiens- |
| | Leone | | | wt/SLE/2014/Makona-G4433.1, partial genome |
| AKC36420 | Sierra | Jul. 20, 2014 | Apr. 19, 2015 | Zaire ebolavirus isolate Ebola virus/H.sapiens- |
| | Leone | | | wt/SLE/2014/Makona-G4437.1, partial genome |
| AKC36429 | Sierra | Jul. 21, 2014 | Apr. 19, 2015 | Zaire ebolavirus isolate Ebola virus/H.sapiens- |
| | Leone | | | wt/SLE/2014/Makona-G4445.1, partial genome |
| AKC36438 | Sierra | Jul. 21, 2014 | Apr. 19, 2015 | Zaire ebolavirus isolate Ebola virus/H.sapiens- |
| | Leone | | | wt/SLE/2014/Makona-G4450.1, partial genome |
| AKC36447 | Sierra | Jul. 21, 2014 | Apr. 19, 2015 | Zaire ebolavirus isolate Ebola virus/H.sapiens- |
| | Leone | | | wt/SLE/2014/Makona-G4454.1, partial genome |
| AKC36456 | Sierra | Aug. 5, 2014 | Apr. 19, 2015 | Zaire ebolavirus isolate Ebola virus/H.sapiens- |
| | Leone | | | wt/SLE/2014/Makona-G4465.1, partial genome |
| AKC36465 | Sierra | Jul. 22, 2014 | Apr. 19, 2015 | Zaire ebolavirus isolate Ebola virus/H.sapiens- |
| | Leone | | | wt/SLE/2014/Makona-G4466.1, partial genome |
| AKC36474 | Sierra | Jul. 26, 2014 | Apr. 19, 2015 | Zaire ebolavirus isolate Ebola virus/H.sapiens- |
| | Leone | | | wt/SLE/2014/Makona-G4527.2, partial genome |
| AKC36483 | Sierra | Aug. 1, 2014 | Apr. 19, 2015 | Zaire ebolavirus isolate Ebola virus/H.sapiens- |
| | Leone | | | wt/SLE/2014/Makona-G4683.1, partial genome |
| AKC36492 | Sierra | Aug. 3, 2014 | Apr. 19, 2015 | Zaire ebolavirus isolate Ebola virus/H.sapiens- |
| | Leone | | | wt/SLE/2014/Makona-G4698.1, partial genome |
| AKC36501 | Sierra | Aug. 3, 2014 | Apr. 19, 2015 | Zaire ebolavirus isolate Ebola virus/H.sapiens- |
| | Leone | | | wt/SLE/2014/Makona-G4701.1, partial genome |
| AKC36510 | Sierra | Aug. 3, 2014 | Apr. 19, 2015 | Zaire ebolavirus isolate Ebola virus/H.sapiens- |
| | Leone | | | wt/SLE/2014/Makona-G4702.1, partial genome |
| AKC36519 | Sierra | Aug. 4, 2014 | Apr. 19, 2015 | Zaire ebolavirus isolate Ebola virus/H.sapiens- |
| | Leone | | | wt/SLE/2014/Makona-G4717.1, partial genome |
| AKC36528 | Sierra | Aug. 4, 2014 | Apr. 19, 2015 | Zaire ebolavirus isolate Ebola virus/H.sapiens- |
| | Leone | | | wt/SLE/2014/Makona-G4725.1, partial genome |
| AKC36537 | Sierra | Aug. 5, 2014 | Apr. 19, 2015 | Zaire ebolavirus isolate Ebola virus/H.sapiens- |
| | Leone | | | wt/SLE/2014/Makona-G4730.1, partial genome |
| AKC36546 | Sierra | Aug. 5, 2014 | Apr. 19, 2015 | Zaire ebolavirus isolate Ebola virus/H.sapiens- |
| | Leone | | | wt/SLE/2014/Makona-G4736.1, partial genome |
| AKC36555 | Sierra | Aug. 5, 2014 | Apr. 19, 2015 | Zaire ebolavirus isolate Ebola virus/H.sapiens- |
| | Leone | | | wt/SLE/2014/Makona-G4748.1, partial genome |
| AKC36564 | Sierra | Aug. 5, 2014 | Apr. 19, 2015 | Zaire ebolavirus isolate Ebola virus/H.sapiens- |
| | Leone | | | wt/SLE/2014/Makona-G4751.1, partial genome |
| AKC36572 | Sierra | Aug. 9, 2014 | Apr. 19, 2015 | Zaire ebolavirus isolate Ebola virus/H.sapiens- |
| | Leone | | | wt/SLE/2014/Makona-G4837.1, partial genome |
| AKC36581 | Sierra | Aug. 10, 2014 | Apr. 19, 2015 | Zaire ebolavirus isolate Ebola virus/H.sapiens- |
| | Leone | | | wt/SLE/2014/Makona-G4856.1, partial genome |
| AKC36590 | Sierra | Aug. 10, 2014 | Apr. 19, 2015 | Zaire ebolavirus isolate Ebola virus/H.sapiens- |
| | Leone | | | wt/SLE/2014/Makona-G4861.1, partial genome |
| AKC36599 | Sierra | Aug. 10, 2014 | Apr. 19, 2015 | Zaire ebolavirus isolate Ebola virus/H.sapiens- |
| | Leone | | | wt/SLE/2014/Makona-G4868.1, partial genome |
| AKC36608 | Sierra | Aug. 11, 2014 | Apr. 19, 2015 | Zaire ebolavirus isolate Ebola virus/H.sapiens- |
| | Leone | | | wt/SLE/2014/Makona-G4886.1, partial genome |
| AKC36617 | Sierra | Aug. 12, 2014 | Apr. 19, 2015 | Zaire ebolavirus isolate Ebola virus/H.sapiens- |
| | Leone | | | wt/SLE/2014/Makona-G4907.1, partial genome |
| AKC36626 | Sierra | Aug. 13, 2014 | Apr. 19, 2015 | Zaire ebolavirus isolate Ebola virus/H.sapiens- |
| | Leone | | | wt/SLE/2014/Makona-G4937.1, partial genome |
| AKC36635 | Sierra | Aug. 12, 2014 | Apr. 19, 2015 | Zaire ebolavirus isolate Ebola virus/H.sapiens- |
| | Leone | | | wt/SLE/2014/Makona-G4942.1, partial genome |
| AKC36644 | Sierra | Aug. 13, 2014 | Apr. 19, 2015 | Zaire ebolavirus isolate Ebola virus/H.sapiens- |
| | Leone | | | wt/SLE/2014/Makona-G4946.1, partial genome |
| AKC36653 | Sierra | Aug. 13, 2014 | Apr. 19, 2015 | Zaire ebolavirus isolate Ebola virus/H.sapiens- |
| | Leone | | | wt/SLE/2014/Makona-G4955.1, partial genome |
| AKC36662 | Sierra | Aug. 13, 2014 | Apr. 19, 2015 | Zaire ebolavirus isolate Ebola virus/H.sapiens- |
| | Leone | | | wt/SLE/2014/Makona-G4956.1, partial genome |
| AKC36671 | Sierra | Aug. 14, 2014 | Apr. 19, 2015 | Zaire ebolavirus isolate Ebola virus/H.sapiens- |
| | Leone | | | wt/SLE/2014/Makona-G4960.1, partial genome |
| AKC36680 | Sierra | Aug. 14, 2014 | Apr. 19, 2015 | Zaire ebolavirus isolate Ebola virus/H.sapiens- |
| | Leone | | | wt/SLE/2014/Makona-G4971.1, partial genome |
| AKC36689 | Sierra | Aug. 14, 2014 | Apr. 19, 2015 | Zaire ebolavirus isolate Ebola virus/H.sapiens- |
| | Leone | | | wt/SLE/2014/Makona-G4972.1, partial genome |
| AKC36698 | Sierra | Aug. 12, 2014 | Apr. 19, 2015 | Zaire ebolavirus isolate Ebola virus/H.sapiens- |
| | Leone | | | wt/SLE/2014/Makona-G4973.1, partial genome |
| AKC36707 | Sierra | Aug. 14, 2014 | Apr. 19, 2015 | Zaire ebolavirus isolate Ebola virus/H.sapiens- |
| | Leone | | | wt/SLE/2014/Makona-G4981.1, partial genome |
| AKC36716 | Sierra | Aug. 14, 2014 | Apr. 19, 2015 | Zaire ebolavirus isolate Ebola virus/H.sapiens- |
| | Leone | | | wt/SLE/2014/Makona-G4982.1, partial genome |
| AKC36725 | Sierra | Aug. 15, 2014 | Apr. 19, 2015 | Zaire ebolavirus isolate Ebola virus/H.sapiens- |
| | Leone | | | wt/SLE/2014/Makona-G4994.1, partial genome |
| AKC36734 | Sierra | Aug. 15, 2014 | Apr. 19, 2015 | Zaire ebolavirus isolate Ebola virus/H.sapiens- |
| | Leone | | | wt/SLE/2014/Makona-G4996.1, partial genome |
| AKC36743 | Sierra | Aug. 15, 2014 | Apr. 19, 2015 | Zaire ebolavirus isolate Ebola virus/H.sapiens- |
| | Leone | | | wt/SLE/2014/Makona-G4999.1, partial genome |
| AKC36752 | Sierra | Aug. 15, 2014 | Apr. 19, 2015 | Zaire ebolavirus isolate Ebola virus/H.sapiens- |
| | Leone | | | wt/SLE/2014/Makona-G5012.3, partial genome |
| AKC36761 | Sierra | Aug. 16, 2014 | Apr. 19, 2015 | Zaire ebolavirus isolate Ebola virus/H.sapiens- |
| | Leone | | | wt/SLE/2014/Makona-G5016.1, partial genome |
| AKC36770 | Sierra | Aug. 16, 2014 | Apr. 19, 2015 | Zaire ebolavirus isolate Ebola virus/H.sapiens- |
| | Leone | | | wt/SLE/2014/Makona-G5019.1, partial genome |
| AKC36779 | Sierra | Aug. 17, 2014 | Apr. 19, 2015 | Zaire ebolavirus isolate Ebola virus/H.sapiens- |
| | Leone | | | wt/SLE/2014/Makona-G5039.1, partial genome |
| AKC36788 | Sierra | Aug. 18, 2014 | Apr. 19, 2015 | Zaire ebolavirus isolate Ebola virus/H.sapiens- |
| | Leone | | | wt/SLE/2014/Makona-G5059.1, partial genome |
| AKC36797 | Sierra | Aug. 17, 2014 | Apr. 19, 2015 | Zaire ebolavirus isolate Ebola virus/H.sapiens- |
| | Leone | | | wt/SLE/2014/Makona-G5064.1, partial genome |
| AKC36806 | Sierra | Aug. 19, 2014 | Apr. 19, 2015 | Zaire ebolavirus isolate Ebola virus/H.sapiens- |
| | Leone | | | wt/SLE/2014/Makona-G5112.1, partial genome |
| AKC36815 | Sierra | Aug. 18, 2014 | Apr. 19, 2015 | Zaire ebolavirus isolate Ebola virus/H.sapiens- |
| | Leone | | | wt/SLE/2014/Makona-G5114.1, partial genome |
| AKC36824 | Sierra | Aug. 24, 2014 | Apr. 19, 2015 | Zaire ebolavirus isolate Ebola virus/H.sapiens- |
| | Leone | | | wt/SLE/2014/Makona-G5119.1, partial genome |
| AKC36833 | Sierra | Aug. 22, 2014 | Apr. 19, 2015 | Zaire ebolavirus isolate Ebola virus/H.sapiens- |
| | Leone | | | wt/SLE/2014/Makona-G5244.1, partial genome |
| AKC36842 | Sierra | Aug. 25, 2014 | Apr. 19, 2015 | Zaire ebolavirus isolate Ebola virus/H.sapiens- |
| | Leone | | | wt/SLE/2014/Makona-G5295.1, partial genome |
| AKC36851 | Sierra | Aug. 25, 2014 | Apr. 19, 2015 | Zaire ebolavirus isolate Ebola virus/H.sapiens- |
| | Leone | | | wt/SLE/2014/Makona-G5296.1, partial genome |
| AKC36860 | Sierra | Aug. 28, 2014 | Apr. 19, 2015 | Zaire ebolavirus isolate Ebola virus/H.sapiens- |
| | Leone | | | wt/SLE/2014/Makona-G5304.1, partial genome |
| AKC36869 | Sierra | Aug. 28, 2014 | Apr. 19, 2015 | Zaire ebolavirus isolate Ebola virus/H.sapiens- |
| | Leone | | | wt/SLE/2014/Makona-G5364.1, partial genome |
| AKC36878 | Sierra | Aug. 28, 2014 | Apr. 19, 2015 | Zaire ebolavirus isolate Ebola virus/H.sapiens- |
| | Leone | | | wt/SLE/2014/Makona-G5370.1, partial genome |
| AKC36887 | Sierra | Sep. 4, 2014 | Apr. 19, 2015 | Zaire ebolavirus isolate Ebola virus/H.sapiens- |
| | Leone | | | wt/SLE/2014/Makona-G5516.1, partial genome |
| AKC36896 | Sierra | Sep. 5, 2014 | Apr. 19, 2015 | Zaire ebolavirus isolate Ebola virus/H.sapiens- |
| | Leone | | | wt/SLE/2014/Makona-G5520.1, partial genome |
| AKC36905 | Sierra | Sep. 5, 2014 | Apr. 19, 2015 | Zaire ebolavirus isolate Ebola virus/H.sapiens- |
| | Leone | | | wt/SLE/2014/Makona-G5529.1, partial genome |
| AKC36914 | Sierra | Sep. 8, 2014 | Apr. 19, 2015 | Zaire ebolavirus isolate Ebola virus/H.sapiens- |
| | Leone | | | wt/SLE/2014/Makona-G5570.1, partial genome |
| AKC36923 | Sierra | Sep. 8, 2014 | Apr. 19, 2015 | Zaire ebolavirus isolate Ebola virus/H.sapiens- |
| | Leone | | | wt/SLE/2014/Makona-G5571.1, partial genome |
| AKC36932 | Sierra | Sep. 10, 2014 | Apr. 19, 2015 | Zaire ebolavirus isolate Ebola virus/H.sapiens- |
| | Leone | | | wt/SLE/2014/Makona-G5617.1, partial genome |
| AKC36941 | Sierra | Sep. 11, 2014 | Apr. 19, 2015 | Zaire ebolavirus isolate Ebola virus/H.sapiens- |
| | Leone | | | wt/SLE/2014/Makona-G5640.1, partial genome |
| AKC36950 | Sierra | Sep. 11, 2014 | Apr. 19, 2015 | Zaire ebolavirus isolate Ebola virus/H.sapiens- |
| | Leone | | | wt/SLE/2014/Makona-G5644.1, partial genome |
| AKC36959 | Sierra | Sep. 11, 2014 | Apr. 19, 2015 | Zaire ebolavirus isolate Ebola virus/H.sapiens- |
| | Leone | | | wt/SLE/2014/Makona-G5647.1, partial genome |
| AKC36968 | Sierra | Sep. 13, 2014 | Apr. 19, 2015 | Zaire ebolavirus isolate Ebola virus/H.sapiens- |
| | Leone | | | wt/SLE/2014/Makona-G5684.1, partial genome |
| AKC36977 | Sierra | Sep. 13, 2014 | Apr. 19, 2015 | Zaire ebolavirus isolate Ebola virus/H.sapiens- |
| | Leone | | | wt/SLE/2014/Makona-G5685.1, partial genome |
| AKC36986 | Sierra | Sep. 14, 2014 | Apr. 19, 2015 | Zaire ebolavirus isolate Ebola virus/H.sapiens- |
| | Leone | | | wt/SLE/2014/Makona-G5691.1, partial genome |
| AKC36995 | Sierra | Sep. 15, 2014 | Apr. 19, 2015 | Zaire ebolavirus isolate Ebola virus/H.sapiens- |
| | Leone | | | wt/SLE/2014/Makona-G5723.1, partial genome |
| AKC37004 | Sierra | Sep. 16, 2014 | Apr. 19, 2015 | Zaire ebolavirus isolate Ebola virus/H.sapiens- |
| | Leone | | | wt/SLE/2014/Makona-G5731.1, partial genome |
| AKC37013 | Sierra | Sep. 16, 2014 | Apr. 19, 2015 | Zaire ebolavirus isolate Ebola virus/H.sapiens- |
| | Leone | | | wt/SLE/2014/Makona-G5737.1, partial genome |
| AKC37022 | Sierra | Sep. 15, 2014 | Apr. 19, 2015 | Zaire ebolavirus isolate Ebola virus/H.sapiens- |
| | Leone | | | wt/SLE/2014/Makona-G5738.1, partial genome |
| AKC37031 | Sierra | Sep. 17, 2014 | Apr. 19, 2015 | Zaire ebolavirus isolate Ebola virus/H.sapiens- |
| | Leone | | | wt/SLE/2014/Makona-G5743.1, partial genome |
| AKC37040 | Sierra | Sep. 18, 2014 | Apr. 19, 2015 | Zaire ebolavirus isolate Ebola virus/H.sapiens- |
| | Leone | | | wt/SLE/2014/Makona-G5756.1, partial genome |
| AKC37049 | Sierra | Sep. 16, 2014 | Apr. 19, 2015 | Zaire ebolavirus isolate Ebola virus/H.sapiens- |
| | Leone | | | wt/SLE/2014/Makona-G5763.1, partial genome |
| AKC37058 | Sierra | Sep. 16, 2014 | Apr. 19, 2015 | Zaire ebolavirus isolate Ebola virus/H.sapiens- |
| | Leone | | | wt/SLE/2014/Makona-G5765.1, partial genome |
| AKC37067 | Sierra | Sep. 16, 2014 | Apr. 19, 2015 | Zaire ebolavirus isolate Ebola virus/H.sapiens- |
| | Leone | | | wt/SLE/2014/Makona-G5767.1, partial genome |
| AKC37076 | Sierra | Sep. 21, 2014 | Apr. 19, 2015 | Zaire ebolavirus isolate Ebola virus/H.sapiens- |
| | Leone | | | wt/SLE/2014/Makona-G5844.1, partial genome |
| AKC37085 | Sierra | Sep. 21, 2014 | Apr. 19, 2015 | Zaire ebolavirus isolate Ebola virus/H.sapiens- |
| | Leone | | | wt/SLE/2014/Makona-G5853.1, partial genome |
| AKC37094 | Sierra | Sep. 22, 2014 | Apr. 19, 2015 | Zaire ebolavirus isolate Ebola virus/H.sapiens- |
| | Leone | | | wt/SLE/2014/Makona-G5879.1, partial genome |
| AKC37103 | Sierra | Sep. 22, 2014 | Apr. 19, 2015 | Zaire ebolavirus isolate Ebola virus/H.sapiens- |
| | Leone | | | wt/SLE/2014/Makona-G5898.1, partial genome |
| AKC37112 | Sierra | Sep. 25, 2014 | Apr. 19, 2015 | Zaire ebolavirus isolate Ebola virus/H.sapiens- |
| | Leone | | | wt/SLE/2014/Makona-G5982.1, partial genome |
| AKC37121 | Sierra | Sep. 25, 2014 | Apr. 19, 2015 | Zaire ebolavirus isolate Ebola virus/H.sapiens- |
| | Leone | | | wt/SLE/2014/Makona-G5983.1, partial genome |
| AKC37139 | Sierra | Sep. 25, 2014 | Apr. 19, 2015 | Zaire ebolavirus isolate Ebola virus/H.sapiens- |
| | Leone | | | wt/SLE/2014/Makona-G5986.1, partial genome |
| AKC37148 | Sierra | Sep. 25, 2014 | Apr. 19, 2015 | Zaire ebolavirus isolate Ebola virus/H.sapiens- |
| | Leone | | | wt/SLE/2014/Makona-G5988.1, partial genome |
| AKC37157 | Sierra | Sep. 25, 2014 | Apr. 19, 2015 | Zaire ebolavirus isolate Ebola virus/H.sapiens- |
| | Leone | | | wt/SLE/2014/Makona-G5996.1, partial genome |
| AKC37166 | Sierra | Sep. 25, 2014 | Apr. 19, 2015 | Zaire ebolavirus isolate Ebola virus/H.sapiens- |
| | Leone | | | wt/SLE/2014/Makona-G5997.1, partial genome |
| AKC37175 | Sierra | Sep. 25, 2014 | Apr. 19, 2015 | Zaire ebolavirus isolate Ebola virus/H.sapiens- |
| | Leone | | | wt/SLE/2014/Makona-G5998.1, partial genome |
| AKC37184 | Sierra | Sep. 25, 2014 | Apr. 19, 2015 | Zaire ebolavirus isolate Ebola virus/H.sapiens- |
| | Leone | | | wt/SLE/2014/Makona-G6012.1, partial genome |
| AKC37193 | Sierra | Sep. 25, 2014 | Apr. 19, 2015 | Zaire ebolavirus isolate Ebola virus/H.sapiens- |
| | Leone | | | wt/SLE/2014/Makona-G6020.1, partial genome |
| AKC37202 | Sierra | Sep. 25, 2014 | Apr. 19, 2015 | Zaire ebolavirus isolate Ebola virus/H.sapiens- |
| | Leone | | | wt/SLE/2014/Makona-G6060.1, partial genome |
| AKC37211 | Sierra | Sep. 25, 2014 | Apr. 19, 2015 | Zaire ebolavirus isolate Ebola virus/H.sapiens- |
| | Leone | | | wt/SLE/2014/Makona-G6062.1, partial genome |
| AKC37220 | Sierra | Sep. 25, 2014 | Apr. 19, 2015 | Zaire ebolavirus isolate Ebola virus/H.sapiens- |
| | Leone | | | wt/SLE/2014/Makona-G6069.1, partial genome |
| AKC37229 | Sierra | Sep. 27, 2014 | Apr. 19, 2015 | Zaire ebolavirus isolate Ebola virus/H.sapiens- |
| | Leone | | | wt/SLE/2014/Makona-G6089.1, partial genome |
| AKC37238 | Sierra | Sep. 27, 2014 | Apr. 19, 2015 | Zaire ebolavirus isolate Ebola virus/H.sapiens- |
| | Leone | | | wt/SLE/2014/Makona-G6091.1, partial genome |
| AKC37247 | Sierra | Sep. 27, 2014 | Apr. 19, 2015 | Zaire ebolavirus isolate Ebola virus/H.sapiens- |
| | Leone | | | wt/SLE/2014/Makona-G6095.1, partial genome |
| AKC37256 | Sierra | Sep. 28, 2014 | Apr. 19, 2015 | Zaire ebolavirus isolate Ebola virus/H.sapiens- |
| | Leone | | | wt/SLE/2014/Makona-G6103.1, partial genome |
| AKC37265 | Sierra | Sep. 28, 2014 | Apr. 19, 2015 | Zaire ebolavirus isolate Ebola virus/H.sapiens- |
| | Leone | | | wt/SLE/2014/Makona-G6104.1, partial genome |
| AIG96617 | Sierra | Jun. 4, 2014 | Jul. 25, 2014 | Zaire ebolavirus isolate Ebola virus/H.sapiens- |
| | Leone | | | wt/SLE/2014/Makona-NM042.1, complete |
| | | | | genome |
| AIG96626 | Sierra | Jun. 9, 2014 | Jul. 25, 2014 | Zaire ebolavirus isolate Ebola virus/H.sapiens- |
| | Leone | | | wt/SLE/2014/Makona-NM042.2, complete |
| | | | | genome |
| AIG96635 | Sierra | Jun. 12, 2014 | Jul. 25, 2014 | Zaire ebolavirus isolate Ebola virus/H.sapiens- |
| | Leone | | | wt/SLE/2014/Makona-NM042.3, complete |
| | | | | genome |
| AJP14319 | Sierra | Sep. 27, 2014 | Mar. 1, 2015 | Zaire ebolavirus isolate Ebolavirus/H.sapiens- |
| | Leone | | | wt/SLE/2014/Makona-J0001, partial genome |
| AJP14355 | Sierra | Sep. 27, 2014 | Mar. 1, 2015 | Zaire ebolavirus isolate Ebolavirus/H.sapiens- |
| | Leone | | | wt/SLE/2014/Makona-J0002, partial genome |
| AJP14453 | Sierra | Sep. 28, 2014 | Mar. 1, 2015 | Zaire ebolavirus isolate Ebolavirus/H.sapiens- |
| | Leone | | | wt/SLE/2014/Makona-J0003, partial genome |
| AJP14606 | Sierra | Sep. 28, 2014 | Mar. 1, 2015 | Zaire ebolavirus isolate Ebolavirus/H.sapiens- |
| | Leone | | | wt/SLE/2014/Makona-J0004, partial genome |
| AJP14247 | Sierra | Sep. 26, 2014 | Mar. 1, 2015 | Zaire ebolavirus isolate Ebolavirus/H.sapiens- |
| | Leone | | | wt/SLE/2014/Makona-J0005, partial genome |
| AJP14265 | Sierra | Sep. 28, 2014 | Mar. 1, 2015 | Zaire ebolavirus isolate Ebolavirus/H.sapiens- |
| | Leone | | | wt/SLE/2014/Makona-J0006, partial genome |
| AJP14274 | Sierra | Sep. 27, 2014 | Mar. 1, 2015 | Zaire ebolavirus isolate Ebolavirus/H.sapiens- |
| | Leone | | | wt/SLE/2014/Makona-J0007, partial genome |
| AJP15056 | Sierra | Sep. 29, 2014 | Mar. 1, 2015 | Zaire ebolavirus isolate Ebolavirus/H.sapiens- |
| | Leone | | | wt/SLE/2014/Makona-J0008, partial genome |
| AJP15200 | Sierra | Sep. 28, 2014 | Mar. 1, 2015 | Zaire ebolavirus isolate Ebolavirus/H.sapiens- |
| | Leone | | | wt/SLE/2014/Makona-J0009, partial genome |
| AJP14346 | Sierra | Sep. 28, 2014 | Mar. 1, 2015 | Zaire ebolavirus isolate Ebolavirus/H.sapiens- |
| | Leone | | | wt/SLE/2014/Makona-J0010, partial genome |
| AJP14364 | Sierra | Sep. 29, 2014 | Mar. 1, 2015 | Zaire ebolavirus isolate Ebolavirus/H.sapiens- |
| | Leone | | | wt/SLE/2014/Makona-J0011, partial genome |
| AJP14373 | Sierra | Sep. 29, 2014 | Mar. 1, 2015 | Zaire ebolavirus isolate Ebolavirus/H.sapiens- |
| | Leone | | | wt/SLE/2014/Makona-J0012, partial genome |
| AJP14382 | Sierra | Sep. 28, 2014 | Mar. 1, 2015 | Zaire ebolavirus isolate Ebolavirus/H.sapiens- |
| | Leone | | | wt/SLE/2014/Makona-J0013, partial genome |
| AJP15254 | Sierra | Sep. 29, 2014 | Mar. 1, 2015 | Zaire ebolavirus isolate Ebolavirus/H.sapiens- |
| | Leone | | | wt/SLE/2014/Makona-J0014, partial genome |
| AJP15263 | Sierra | Sep. 26, 2014 | Mar. 1, 2015 | Zaire ebolavirus isolate Ebolavirus/H.sapiens- |
| | Leone | | | wt/SLE/2014/Makona-J0015, partial genome |
| AJP15272 | Sierra | Sep. 30, 2014 | Mar. 1, 2015 | Zaire ebolavirus isolate Ebolavirus/H.sapiens- |
| | Leone | | | wt/SLE/2014/Makona-J0016, partial genome |
| AJP15317 | Sierra | Sep. 26, 2014 | Mar. 1, 2015 | Zaire ebolavirus isolate Ebolavirus/H.sapiens- |
| | Leone | | | wt/SLE/2014/Makona-J0017, partial genome |
| AJP14391 | Sierra | Sep. 30, 2014 | Mar. 1, 2015 | Zaire ebolavirus isolate Ebolavirus/H.sapiens- |
| | Leone | | | wt/SLE/2014/Makona-J0018, partial genome |
| AJP15380 | Sierra | Sep. 25, 2014 | Mar. 1, 2015 | Zaire ebolavirus isolate Ebolavirus/H.sapiens- |
| | Leone | | | wt/SLE/2014/Makona-J0019, partial genome |
| AJP15389 | Sierra | Sep. 25, 2014 | Mar. 1, 2015 | Zaire ebolavirus isolate Ebolavirus/H.sapiens- |
| | Leone | | | wt/SLE/2014/Makona-J0020, partial genome |
| AJP15398 | Sierra | Sep. 29, 2014 | Mar. 1, 2015 | Zaire ebolavirus isolate Ebolavirus/H.sapiens- |
| | Leone | | | wt/SLE/2014/Makona-J0021, partial genome |
| AJP15407 | Sierra | Sep. 25, 2014 | Mar. 1, 2015 | Zaire ebolavirus isolate Ebolavirus/H.sapiens- |
| | Leone | | | wt/SLE/2014/Makona-J0022, partial genome |
| AJP14462 | Sierra | Oct. 1, 2014 | Mar. 1, 2015 | Zaire ebolavirus isolate Ebolavirus/H.sapiens- |
| | Leone | | | wt/SLE/2014/Makona-J0023, partial genome |
| AJP14561 | Sierra | Sep. 29, 2014 | Mar. 1, 2015 | Zaire ebolavirus isolate Ebolavirus/H.sapiens- |
| | Leone | | | wt/SLE/2014/Makona-J0024, partial genome |
| AJP14588 | Sierra | Oct. 2, 2014 | Mar. 1, 2015 | Zaire ebolavirus isolate Ebolavirus/H.sapiens- |
| | Leone | | | wt/SLE/2014/Makona-J0025, partial genome |
| AJP14624 | Sierra | Oct. 2, 2014 | Mar. 1, 2015 | Zaire ebolavirus isolate Ebolavirus/H.sapiens- |
| | Leone | | | wt/SLE/2014/Makona-J0026, partial genome |
| AJP14696 | Sierra | Oct. 2, 2014 | Mar. 1, 2015 | Zaire ebolavirus isolate Ebolavirus/H.sapiens- |
| | Leone | | | wt/SLE/2014/Makona-J0027, partial genome |
| AJP14741 | Sierra | Oct. 2, 2014 | Mar. 1, 2015 | Zaire ebolavirus isolate Ebolavirus/H.sapiens- |
| | Leone | | | wt/SLE/2014/Makona-J0028, partial genome |
| AJP14786 | Sierra | Sep. 29, 2014 | Mar. 1, 2015 | Zaire ebolavirus isolate Ebolavirus/H.sapiens- |
| | Leone | | | wt/SLE/2014/Makona-J0029, partial genome |
| AJP14049 | Sierra | Oct. 3, 2014 | Mar. 1, 2015 | Zaire ebolavirus isolate Ebolavirus/H.sapiens- |
| | Leone | | | wt/SLE/2014/Makona-J0030, partial genome |
| AJP14058 | Sierra | Oct. 3, 2014 | Mar. 1, 2015 | Zaire ebolavirus isolate Ebolavirus/H.sapiens- |
| | Leone | | | wt/SLE/2014/Makona-J0031, partial genome |
| AJP14813 | Sierra | Sep. 30, 2014 | Mar. 1, 2015 | Zaire ebolavirus isolate Ebolavirus/H.sapiens- |
| | Leone | | | wt/SLE/2014/Makona-J0032, partial genome |
| AJP14822 | Sierra | Oct. 3, 2014 | Mar. 1, 2015 | Zaire ebolavirus isolate Ebolavirus/H.sapiens- |
| | Leone | | | wt/SLE/2014/Makona-J0033, partial genome |
| AJP14067 | Sierra | Sep. 30, 2014 | Mar. 1, 2015 | Zaire ebolavirus isolate Ebolavirus/H.sapiens- |
| | Leone | | | wt/SLE/2014/Makona-J0034, partial genome |
| AJP14076 | Sierra | Oct. 1, 2014 | Mar. 1, 2015 | Zaire ebolavirus isolate Ebolavirus/H.sapiens- |
| | Leone | | | wt/SLE/2014/Makona-J0035, partial genome |
| AJP14840 | Sierra | Oct. 3, 2014 | Mar. 1, 2015 | Zaire ebolavirus isolate Ebolavirus/H.sapiens- |
| | Leone | | | wt/SLE/2014/Makona-J0036, partial genome |
| AJP14130 | Sierra | Oct. 3, 2014 | Mar. 1, 2015 | Zaire ebolavirus isolate Ebolavirus/H.sapiens- |
| | Leone | | | wt/SLE/2014/Makona-J0037, partial genome |
| AJP14157 | Sierra | Sep. 30, 2014 | Mar. 1, 2015 | Zaire ebolavirus isolate Ebolavirus/H.sapiens- |
| | Leone | | | wt/SLE/2014/Makona-J0038, partial genome |
| AJP14175 | Sierra | Oct. 3, 2014 | Mar. 1, 2015 | Zaire ebolavirus isolate Ebolavirus/H.sapiens- |
| | Leone | | | wt/SLE/2014/Makona-J0039, partial genome |
| AJP14256 | Sierra | Oct. 4, 2014 | Mar. 1, 2015 | Zaire ebolavirus isolate Ebolavirus/H.sapiens- |
| | Leone | | | wt/SLE/2014/Makona-J0040, partial genome |
| AJP14984 | Sierra | Oct. 4, 2014 | Mar. 1, 2015 | Zaire ebolavirus isolate Ebolavirus/H.sapiens- |
| | Leone | | | wt/SLE/2014/Makona-J0041, partial genome |
| AJP14993 | Sierra | Oct. 4, 2014 | Mar. 1, 2015 | Zaire ebolavirus isolate Ebolavirus/H.sapiens- |
| | Leone | | | wt/SLE/2014/Makona-J0042, partial genome |
| AJP15002 | Sierra | Oct. 4, 2014 | Mar. 1, 2015 | Zaire ebolavirus isolate Ebolavirus/H.sapiens- |
| | Leone | | | wt/SLE/2014/Makona-J0043, partial genome |
| AJP15011 | Sierra | Oct. 5, 2014 | Mar. 1, 2015 | Zaire ebolavirus isolate Ebolavirus/H.sapiens- |
| | Leone | | | wt/SLE/2014/Makona-J0044, partial genome |
| AJP15020 | Sierra | Oct. 5, 2014 | Mar. 1, 2015 | Zaire ebolavirus isolate Ebolavirus/H.sapiens- |
| | Leone | | | wt/SLE/2014/Makona-J0045, partial genome |
| AJP15029 | Sierra | Oct. 7, 2014 | Mar. 1, 2015 | Zaire ebolavirus isolate Ebolavirus/H.sapiens- |
| | Leone | | | wt/SLE/2014/Makona-J0046, partial genome |
| AJP14283 | Sierra | Oct. 5, 2014 | Mar. 1, 2015 | Zaire ebolavirus isolate Ebolavirus/H.sapiens- |
| | Leone | | | wt/SLE/2014/Makona-J0047, partial genome |
| AJP15038 | Sierra | Oct. 5, 2014 | Mar. 1, 2015 | Zaire ebolavirus isolate Ebolavirus/H.sapiens- |
| | Leone | | | wt/SLE/2014/Makona-J0048, partial genome |
| AJP15047 | Sierra | Oct. 7, 2014 | Mar. 1, 2015 | Zaire ebolavirus isolate Ebolavirus/H.sapiens- |
| | Leone | | | wt/SLE/2014/Makona-J0049, partial genome |
| AJP15065 | Sierra | Oct. 5, 2014 | Mar. 1, 2015 | Zaire ebolavirus isolate Ebolavirus/H.sapiens- |
| | Leone | | | wt/SLE/2014/Makona-J0050, partial genome |
| AJP14292 | Sierra | Oct. 7, 2014 | Mar. 1, 2015 | Zaire ebolavirus isolate Ebolavirus/H.sapiens- |
| | Leone | | | wt/SLE/2014/Makona-J0051, partial genome |
| AJP15074 | Sierra | Oct. 8, 2014 | Mar. 1, 2015 | Zaire ebolavirus isolate Ebolavirus/H.sapiens- |
| | Leone | | | wt/SLE/2014/Makona-J0052, partial genome |
| AJP15083 | Sierra | Oct. 6, 2014 | Mar. 1, 2015 | Zaire ebolavirus isolate Ebolavirus/H.sapiens- |
| | Leone | | | wt/SLE/2014/Makona-J0053, partial genome |
| AJP15092 | Sierra | Oct. 6, 2014 | Mar. 1, 2015 | Zaire ebolavirus isolate Ebolavirus/H.sapiens- |
| | Leone | | | wt/SLE/2014/Makona-J0054, partial genome |
| AJP15101 | Sierra | Oct. 6, 2014 | Mar. 1, 2015 | Zaire ebolavirus isolate Ebolavirus/H.sapiens- |
| | Leone | | | wt/SLE/2014/Makona-J0055, partial genome |
| AJP14301 | Sierra | Oct. 8, 2014 | Mar. 1, 2015 | Zaire ebolavirus isolate Ebolavirus/H.sapiens- |
| | Leone | | | wt/SLE/2014/Makona-J0056, partial genome |
| AJP14310 | Sierra | Oct. 5, 2014 | Mar. 1, 2015 | Zaire ebolavirus isolate Ebolavirus/H.sapiens- |
| | Leone | | | wt/SLE/2014/Makona-J0057, partial genome |
| AJP15110 | Sierra | Oct. 8, 2014 | Mar. 1, 2015 | Zaire ebolavirus isolate Ebolavirus/H.sapiens- |
| | Leone | | | wt/SLE/2014/Makona-J0058, partial genome |
| AJP15119 | Sierra | Oct. 8, 2014 | Mar. 1, 2015 | Zaire ebolavirus isolate Ebolavirus/H.sapiens- |
| | Leone | | | wt/SLE/2014/Makona-J0059, partial genome |
| AJP15128 | Sierra | Oct. 6, 2014 | Mar. 1, 2015 | Zaire ebolavirus isolate Ebolavirus/H.sapiens- |
| | Leone | | | wt/SLE/2014/Makona-J0060, partial genome |
| AJP14328 | Sierra | Oct. 10, 2014 | Mar. 1, 2015 | Zaire ebolavirus isolate Ebolavirus/H.sapiens- |
| | Leone | | | wt/SLE/2014/Makona-J0061, partial genome |
| AJP15137 | Sierra | Oct. 10, 2014 | Mar. 1, 2015 | Zaire ebolavirus isolate Ebolavirus/H.sapiens- |
| | Leone | | | wt/SLE/2014/Makona-J0062, partial genome |
| AJP14337 | Sierra | Oct. 10, 2014 | Mar. 1, 2015 | Zaire ebolavirus isolate Ebolavirus/H.sapiens- |
| | Leone | | | wt/SLE/2014/Makona-J0063, partial genome |
| AJP15146 | Sierra | Oct. 9, 2014 | Mar. 1, 2015 | Zaire ebolavirus isolate Ebolavirus/H.sapiens- |
| | Leone | | | wt/SLE/2014/Makona-J0064, partial genome |
| AJP15155 | Sierra | Oct. 9, 2014 | Mar. 1, 2015 | Zaire ebolavirus isolate Ebolavirus/H.sapiens- |
| | Leone | | | wt/SLE/2014/Makona-J0065, partial genome |
| AJP15164 | Sierra | Oct. 10, 2014 | Mar. 1, 2015 | Zaire ebolavirus isolate Ebolavirus/H.sapiens- |
| | Leone | | | wt/SLE/2014/Makona-J0066, partial genome |
| AJP15173 | Sierra | Oct. 9, 2014 | Mar. 1, 2015 | Zaire ebolavirus isolate Ebolavirus/H.sapiens- |
| | Leone | | | wt/SLE/2014/Makona-J0067, partial genome |
| AJP15182 | Sierra | Oct. 9, 2014 | Mar. 1, 2015 | Zaire ebolavirus isolate Ebolavirus/H.sapiens- |
| | Leone | | | wt/SLE/2014/Makona-J0068, partial genome |
| AJP15191 | Sierra | Oct. 9, 2014 | Mar. 1, 2015 | Zaire ebolavirus isolate Ebolavirus/H.sapiens- |
| | Leone | | | wt/SLE/2014/Makona-J0069, partial genome |
| AJP15209 | Sierra | Oct. 9, 2014 | Mar. 1, 2015 | Zaire ebolavirus isolate Ebolavirus/H.sapiens- |
| | Leone | | | wt/SLE/2014/Makona-J0070, partial genome |
| AJP15218 | Sierra | Oct. 9, 2014 | Mar. 1, 2015 | Zaire ebolavirus isolate Ebolavirus/H.sapiens- |
| | Leone | | | wt/SLE/2014/Makona-J0071, partial genome |
| AJP15227 | Sierra | Oct. 9, 2014 | Mar. 1, 2015 | Zaire ebolavirus isolate Ebolavirus/H.sapiens- |
| | Leone | | | wt/SLE/2014/Makona-J0072, partial genome |
| AJP15236 | Sierra | Oct. 12, 2014 | Mar. 1, 2015 | Zaire ebolavirus isolate Ebolavirus/H.sapiens- |
| | Leone | | | wt/SLE/2014/Makona-J0073, partial genome |
| AJP15245 | Sierra | Oct. 13, 2014 | Mar. 1, 2015 | Zaire ebolavirus isolate Ebolavirus/H.sapiens- |
| | Leone | | | wt/SLE/2014/Makona-J0074, partial genome |
| AJP15281 | Sierra | Oct. 17, 2014 | Mar. 1, 2015 | Zaire ebolavirus isolate Ebolavirus/H.sapiens- |
| | Leone | | | wt/SLE/2014/Makona-J0075, partial genome |
| AJP15290 | Sierra | Oct. 17, 2014 | Mar. 1, 2015 | Zaire ebolavirus isolate Ebolavirus/H.sapiens- |
| | Leone | | | wt/SLE/2014/Makona-J0076, partial genome |
| AJP15299 | Sierra | Oct. 17, 2014 | Mar. 1, 2015 | Zaire ebolavirus isolate Ebolavirus/H.sapiens- |
| | Leone | | | wt/SLE/2014/Makona-J0077, partial genome |
| AJP15308 | Sierra | Oct. 18, 2014 | Mar. 1, 2015 | Zaire ebolavirus isolate Ebolavirus/H.sapiens- |
| | Leone | | | wt/SLE/2014/Makona-J0078, partial genome |
| AJP15326 | Sierra | Oct. 16, 2014 | Mar. 1, 2015 | Zaire ebolavirus isolate Ebolavirus/H.sapiens- |
| | Leone | | | wt/SLE/2014/Makona-J0079, partial genome |
| AJP15335 | Sierra | Oct. 18, 2014 | Mar. 1, 2015 | Zaire ebolavirus isolate Ebolavirus/H.sapiens- |
| | Leone | | | wt/SLE/2014/Makona-J0080, partial genome |
| AJP15344 | Sierra | Oct. 16, 2014 | Mar. 1, 2015 | Zaire ebolavirus isolate Ebolavirus/H.sapiens- |
| | Leone | | | wt/SLE/2014/Makona-J0081, partial genome |
| AJP15353 | Sierra | Oct. 16, 2014 | Mar. 1, 2015 | Zaire ebolavirus isolate Ebolavirus/H.sapiens- |
| | Leone | | | wt/SLE/2014/Makona-J0082, partial genome |
| AJP15362 | Sierra | Oct. 18, 2014 | Mar. 1, 2015 | Zaire ebolavirus isolate Ebolavirus/H.sapiens- |
| | Leone | | | wt/SLE/2014/Makona-J0083, partial genome |
| AJP15371 | Sierra | Oct. 16, 2014 | Mar. 1, 2015 | Zaire ebolavirus isolate Ebolavirus/H.sapiens- |
| | Leone | | | wt/SLE/2014/Makona-J0084, partial genome |
| AJP14400 | Sierra | Oct. 17, 2014 | Mar. 1, 2015 | Zaire ebolavirus isolate Ebolavirus/H.sapiens- |
| | Leone | | | wt/SLE/2014/Makona-J0085, partial genome |
| AJP14417 | Sierra | Oct. 23, 2014 | Mar. 1, 2015 | Zaire ebolavirus isolate Ebolavirus/H.sapiens- |
| | Leone | | | wt/SLE/2014/Makona-J0087, partial genome |
| AJP14426 | Sierra | Oct. 20, 2014 | Mar. 1, 2015 | Zaire ebolavirus isolate Ebolavirus/H.sapiens- |
| | Leone | | | wt/SLE/2014/Makona-J0088, partial genome |
| AJP15416 | Sierra | Oct. 23, 2014 | Mar. 1, 2015 | Zaire ebolavirus isolate Ebolavirus/H.sapiens- |
| | Leone | | | wt/SLE/2014/Makona-J0089, partial genome |
| AJP14435 | Sierra | Oct. 23, 2014 | Mar. 1, 2015 | Zaire ebolavirus isolate Ebolavirus/H.sapiens- |
| | Leone | | | wt/SLE/2014/Makona-J0090, partial genome |
| AJP15425 | Sierra | Oct. 25, 2014 | Mar. 1, 2015 | Zaire ebolavirus isolate Ebolavirus/H.sapiens- |
| | Leone | | | wt/SLE/2014/Makona-J0091, partial genome |
| AJP14444 | Sierra | Oct. 25, 2014 | Mar. 1, 2015 | Zaire ebolavirus isolate Ebolavirus/H.sapiens- |
| | Leone | | | wt/SLE/2014/Makona-J0092, partial genome |
| AJP15434 | Sierra | Oct. 24, 2014 | Mar. 1, 2015 | Zaire ebolavirus isolate Ebolavirus/H.sapiens- |
| | Leone | | | wt/SLE/2014/Makona-J0093, partial genome |
| AJP15443 | Sierra | Oct. 27, 2014 | Mar. 1, 2015 | Zaire ebolavirus isolate Ebolavirus/H.sapiens- |
| | Leone | | | wt/SLE/2014/Makona-J0094, partial genome |
| AJP14471 | Sierra | Oct. 27, 2014 | Mar. 1, 2015 | Zaire ebolavirus isolate Ebolavirus/H.sapiens- |
| | Leone | | | wt/SLE/2014/Makona-J0095, partial genome |
| AJP14480 | Sierra | Oct. 27, 2014 | Mar. 1, 2015 | Zaire ebolavirus isolate Ebolavirus/H.sapiens- |
| | Leone | | | wt/SLE/2014/Makona-J0096, partial genome |
| AJP15460 | Sierra | Oct. 28, 2014 | Mar. 1, 2015 | Zaire ebolavirus isolate Ebolavirus/H.sapiens- |
| | Leone | | | wt/SLE/2014/Makona-J0098, partial genome |
| AJP15469 | Sierra | Oct. 28, 2014 | Mar. 1, 2015 | Zaire ebolavirus isolate Ebolavirus/H.sapiens- |
| | Leone | | | wt/SLE/2014/Makona-J0099, partial genome |
| AJP14489 | Sierra | Oct. 26, 2014 | Mar. 1, 2015 | Zaire ebolavirus isolate Ebolavirus/H.sapiens- |
| | Leone | | | wt/SLE/2014/Makona-J0100, partial genome |
| AJP14498 | Sierra | Oct. 29, 2014 | Mar. 1, 2015 | Zaire ebolavirus isolate Ebolavirus/H.sapiens- |
| | Leone | | | wt/SLE/2014/Makona-J0101, partial genome |
| AJP14507 | Sierra | Oct. 27, 2014 | Mar. 1, 2015 | Zaire ebolavirus isolate Ebolavirus/H.sapiens- |
| | Leone | | | wt/SLE/2014/Makona-J0102, partial genome |
| AJP14516 | Sierra | Oct. 29, 2014 | Mar. 1, 2015 | Zaire ebolavirus isolate Ebolavirus/H.sapiens- |
| | Leone | | | wt/SLE/2014/Makona-J0103, partial genome |
| AJP15478 | Sierra | Oct. 29, 2014 | Mar. 1, 2015 | Zaire ebolavirus isolate Ebolavirus/H.sapiens- |
| | Leone | | | wt/SLE/2014/Makona-J0104, partial genome |
| AJP15487 | Sierra | Oct. 29, 2014 | Mar. 1, 2015 | Zaire ebolavirus isolate Ebolavirus/H.sapiens- |
| | Leone | | | wt/SLE/2014/Makona-J0105, partial genome |
| AJP15496 | Sierra | Oct. 28, 2014 | Mar. 1, 2015 | Zaire ebolavirus isolate Ebolavirus/H.sapiens- |
| | Leone | | | wt/SLE/2014/Makona-J0106, partial genome |
| AJP15505 | Sierra | Oct. 29, 2014 | Mar. 1, 2015 | Zaire ebolavirus isolate Ebolavirus/H.sapiens- |
| | Leone | | | wt/SLE/2014/Makona-J0107, partial genome |
| AJP14525 | Sierra | Oct. 28, 2014 | Mar. 1, 2015 | Zaire ebolavirus isolate Ebolavirus/H.sapiens- |
| | Leone | | | wt/SLE/2014/Makona-J0108, partial genome |
| AJP13941 | Sierra | Oct. 31, 2014 | Mar. 1, 2015 | Zaire ebolavirus isolate Ebolavirus/H.sapiens- |
| | Leone | | | wt/SLE/2014/Makona-J0109, partial genome |
| AJP14534 | Sierra | Oct. 31, 2014 | Mar. 1, 2015 | Zaire ebolavirus isolate Ebolavirus/H.sapiens- |
| | Leone | | | wt/SLE/2014/Makona-J0110, partial genome |
| AJP13950 | Sierra | Oct. 30, 2014 | Mar. 1, 2015 | Zaire ebolavirus isolate Ebolavirus/H.sapiens- |
| | Leone | | | wt/SLE/2014/Makona-J0111, partial genome |
| AJP14543 | Sierra | Oct. 31, 2014 | Mar. 1, 2015 | Zaire ebolavirus isolate Ebolavirus/H.sapiens- |
| | Leone | | | wt/SLE/2014/Makona-J0112, partial genome |
| AJP14552 | Sierra | Oct. 30, 2014 | Mar. 1, 2015 | Zaire ebolavirus isolate Ebolavirus/H.sapiens- |
| | Leone | | | wt/SLE/2014/Makona-J0113, partial genome |
| AJP13959 | Sierra | Oct. 29, 2014 | Mar. 1, 2015 | Zaire ebolavirus isolate Ebolavirus/H.sapiens- |
| | Leone | | | wt/SLE/2014/Makona-J0114, partial genome |
| AJP13968 | Sierra | Oct. 29, 2014 | Mar. 1, 2015 | Zaire ebolavirus isolate Ebolavirus/H.sapiens- |
| | Leone | | | wt/SLE/2014/Makona-J0115, partial genome |
| AJP14570 | Sierra | Oct. 30, 2014 | Mar. 1, 2015 | Zaire ebolavirus isolate Ebolavirus/H.sapiens- |
| | Leone | | | wt/SLE/2014/Makona-J0116, partial genome |
| AJP14579 | Sierra | Oct. 31, 2014 | Mar. 1, 2015 | Zaire ebolavirus isolate Ebolavirus/H.sapiens- |
| | Leone | | | wt/SLE/2014/Makona-J0117, partial genome |
| AJP13977 | Sierra | Oct. 31, 2014 | Mar. 1, 2015 | Zaire ebolavirus isolate Ebolavirus/H.sapiens- |
| | Leone | | | wt/SLE/2014/Makona-J0118, partial genome |
| AJP14597 | Sierra | Oct. 30, 2014 | Mar. 1, 2015 | Zaire ebolavirus isolate Ebolavirus/H.sapiens- |
| | Leone | | | wt/SLE/2014/Makona-J0119, partial genome |
| AJP13986 | Sierra | Oct. 30, 2014 | Mar. 1, 2015 | Zaire ebolavirus isolate Ebolavirus/H.sapiens- |
| | Leone | | | wt/SLE/2014/Makona-J0120, partial genome |
| AJP14615 | Sierra | Oct. 29, 2014 | Mar. 1, 2015 | Zaire ebolavirus isolate Ebolavirus/H.sapiens- |
| | Leone | | | wt/SLE/2014/Makona-J0121, partial genome |
| AJP14633 | Sierra | Oct. 29, 2014 | Mar. 1, 2015 | Zaire ebolavirus isolate Ebolavirus/H.sapiens- |
| | Leone | | | wt/SLE/2014/Makona-J0122, partial genome |
| AJP14642 | Sierra | Nov. 1, 2014 | Mar. 1, 2015 | Zaire ebolavirus isolate Ebolavirus/H.sapiens- |
| | Leone | | | wt/SLE/2014/Makona-J0123, partial genome |
| AJP14651 | Sierra | Nov. 2, 2014 | Mar. 1, 2015 | Zaire ebolavirus isolate Ebolavirus/H.sapiens- |
| | Leone | | | wt/SLE/2014/Makona-J0124, partial genome |
| AJP14660 | Sierra | Oct. 31, 2014 | Mar. 1, 2015 | Zaire ebolavirus isolate Ebolavirus/H.sapiens- |
| | Leone | | | wt/SLE/2014/Makona-J0125, partial genome |
| AJP14669 | Sierra | Oct. 31, 2014 | Mar. 1, 2015 | Zaire ebolavirus isolate Ebolavirus/H.sapiens- |
| | Leone | | | wt/SLE/2014/Makona-J0126, partial genome |
| AJP14678 | Sierra | Oct. 30, 2014 | Mar. 1, 2015 | Zaire ebolavirus isolate Ebolavirus/H.sapiens- |
| | Leone | | | wt/SLE/2014/Makona-J0127, partial genome |
| AJP14687 | Sierra | Oct. 31, 2014 | Mar. 1, 2015 | Zaire ebolavirus isolate Ebolavirus/H.sapiens- |
| | Leone | | | wt/SLE/2014/Makona-J0128, partial genome |
| AJP13995 | Sierra | Nov. 2, 2014 | Mar. 1, 2015 | Zaire ebolavirus isolate Ebolavirus/H.sapiens- |
| | Leone | | | wt/SLE/2014/Makona-J0129, partial genome |
| AJP14705 | Sierra | Nov. 2, 2014 | Mar. 1, 2015 | Zaire ebolavirus isolate Ebolavirus/H.sapiens- |
| | Leone | | | wt/SLE/2014/Makona-J0130, partial genome |
| AJP14714 | Sierra | Oct. 30, 2014 | Mar. 1, 2015 | Zaire ebolavirus isolate Ebolavirus/H.sapiens- |
| | Leone | | | wt/SLE/2014/Makona-J0131, partial genome |
| AJP14004 | Sierra | Nov. 2, 2014 | Mar. 1, 2015 | Zaire ebolavirus isolate Ebolavirus/H.sapiens- |
| | Leone | | | wt/SLE/2014/Makona-J0132, partial genome |
| AJP14723 | Sierra | Oct. 31, 2014 | Mar. 1, 2015 | Zaire ebolavirus isolate Ebolavirus/H.sapiens- |
| | Leone | | | wt/SLE/2014/Makona-J0133, partial genome |
| AJP14732 | Sierra | Oct. 31, 2014 | Mar. 1, 2015 | Zaire ebolavirus isolate Ebolavirus/H.sapiens- |
| | Leone | | | wt/SLE/2014/Makona-J0134, partial genome |
| AJP14013 | Sierra | Nov. 3, 2014 | Mar. 1, 2015 | Zaire ebolavirus isolate Ebolavirus/H.sapiens- |
| | Leone | | | wt/SLE/2014/Makona-J0135, partial genome |
| AJP14750 | Sierra | Nov. 1, 2014 | Mar. 1, 2015 | Zaire ebolavirus isolate Ebolavirus/H.sapiens- |
| | Leone | | | wt/SLE/2014/Makona-J0136, partial genome |
| AJP14759 | Sierra | Nov. 1, 2014 | Mar. 1, 2015 | Zaire ebolavirus isolate Ebolavirus/H.sapiens- |
| | Leone | | | wt/SLE/2014/Makona-J0137, partial genome |
| AJP14768 | Sierra | Nov. 1, 2014 | Mar. 1, 2015 | Zaire ebolavirus isolate Ebolavirus/H.sapiens- |
| | Leone | | | wt/SLE/2014/Makona-J0138, partial genome |
| AJP14777 | Sierra | Oct. 30, 2014 | Mar. 1, 2015 | Zaire ebolavirus isolate Ebolavirus/H.sapiens- |
| | Leone | | | wt/SLE/2014/Makona-J0139, partial genome |
| AJP14022 | Sierra | Oct. 30, 2014 | Mar. 1, 2015 | Zaire ebolavirus isolate Ebolavirus/H.sapiens- |
| | Leone | | | wt/SLE/2014/Makona-J0140, partial genome |
| AJP14795 | Sierra | Nov. 4, 2014 | Mar. 1, 2015 | Zaire ebolavirus isolate Ebolavirus/H.sapiens- |
| | Leone | | | wt/SLE/2014/Makona-J0141, partial genome |
| AJP14804 | Sierra | Nov. 3, 2014 | Mar. 1, 2015 | Zaire ebolavirus isolate Ebolavirus/H.sapiens- |
| | Leone | | | wt/SLE/2014/Makona-J0142, partial genome |
| AJP14031 | Sierra | Nov. 4, 2014 | Mar. 1, 2015 | Zaire ebolavirus isolate Ebolavirus/H.sapiens- |
| | Leone | | | wt/SLE/2014/Makona-J0143, partial genome |
| AJP14040 | Sierra | Nov. 4, 2014 | Mar. 1, 2015 | Zaire ebolavirus isolate Ebolavirus/H.sapiens- |
| | Leone | | | wt/SLE/2014/Makona-J0144, partial genome |
| AJP14831 | Sierra | Nov. 6, 2014 | Mar. 1, 2015 | Zaire ebolavirus isolate Ebolavirus/H.sapiens- |
| | Leone | | | wt/SLE/2014/Makona-J0145, partial genome |
| AJP14085 | Sierra | Nov. 7, 2014 | Mar. 1, 2015 | Zaire ebolavirus isolate Ebolavirus/H.sapiens- |
| | Leone | | | wt/SLE/2014/Makona-J0146, partial genome |
| AJP14094 | Sierra | Nov. 7, 2014 | Mar. 1, 2015 | Zaire ebolavirus isolate Ebolavirus/H.sapiens- |
| | Leone | | | wt/SLE/2014/Makona-J0147, partial genome |
| AJP14103 | Sierra | Nov. 6, 2014 | Mar. 1, 2015 | Zaire ebolavirus isolate Ebolavirus/H.sapiens- |
| | Leone | | | wt/SLE/2014/Makona-J0148, partial genome |
| AJP14849 | Sierra | Nov. 7, 2014 | Mar. 1, 2015 | Zaire ebolavirus isolate Ebolavirus/H.sapiens- |
| | Leone | | | wt/SLE/2014/Makona-J0149, partial genome |
| AJP14858 | Sierra | Nov. 6, 2014 | Mar. 1, 2015 | Zaire ebolavirus isolate Ebolavirus/H.sapiens- |
| | Leone | | | wt/SLE/2014/Makona-J0150, partial genome |
| AJP14112 | Sierra | Nov. 7, 2014 | Mar. 1, 2015 | Zaire ebolavirus isolate Ebolavirus/H.sapiens- |
| | Leone | | | wt/SLE/2014/Makona-J0151, partial genome |
| AJP14121 | Sierra | Nov. 7, 2014 | Mar. 1, 2015 | Zaire ebolavirus isolate Ebolavirus/H.sapiens- |
| | Leone | | | wt/SLE/2014/Makona-J0152, partial genome |
| AJP14139 | Sierra | Nov. 7, 2014 | Mar. 1, 2015 | Zaire ebolavirus isolate Ebolavirus/H.sapiens- |
| | Leone | | | wt/SLE/2014/Makona-J0153, partial genome |
| AJP14148 | Sierra | Nov. 7, 2014 | Mar. 1, 2015 | Zaire ebolavirus isolate Ebolavirus/H.sapiens- |
| | Leone | | | wt/SLE/2014/Makona-J0154, partial genome |
| AJP14867 | Sierra | Nov. 7, 2014 | Mar. 1, 2015 | Zaire ebolavirus isolate Ebolavirus/H.sapiens- |
| | Leone | | | wt/SLE/2014/Makona-J0155, partial genome |
| AJP14876 | Sierra | Nov. 7, 2014 | Mar. 1, 2015 | Zaire ebolavirus isolate Ebolavirus/H.sapiens- |
| | Leone | | | wt/SLE/2014/Makona-J0156, partial genome |
| AJP14885 | Sierra | Nov. 6, 2014 | Mar. 1, 2015 | Zaire ebolavirus isolate Ebolavirus/H.sapiens- |
| | Leone | | | wt/SLE/2014/Makona-J0157, partial genome |
| AJP14894 | Sierra | Nov. 8, 2014 | Mar. 1, 2015 | Zaire ebolavirus isolate Ebolavirus/H.sapiens- |
| | Leone | | | wt/SLE/2014/Makona-J0158, partial genome |
| AJP14166 | Sierra | Nov. 5, 2014 | Mar. 1, 2015 | Zaire ebolavirus isolate Ebolavirus/H.sapiens- |
| | Leone | | | wt/SLE/2014/Makona-J0159, partial genome |
| AJP14184 | Sierra | Nov. 7, 2014 | Mar. 1, 2015 | Zaire ebolavirus isolate Ebolavirus/H.sapiens- |
| | Leone | | | wt/SLE/2014/Makona-J0160, partial genome |
| AJP14903 | Sierra | Nov. 8, 2014 | Mar. 1, 2015 | Zaire ebolavirus isolate Ebolavirus/H.sapiens- |
| | Leone | | | wt/SLE/2014/Makona-J0161, partial genome |
| AJP14193 | Sierra | Nov. 9, 2014 | Mar. 1, 2015 | Zaire ebolavirus isolate Ebolavirus/H.sapiens- |
| | Leone | | | wt/SLE/2014/Makona-J0162, partial genome |
| AJP14912 | Sierra | Nov. 8, 2014 | Mar. 1, 2015 | Zaire ebolavirus isolate Ebolavirus/H.sapiens- |
| | Leone | | | wt/SLE/2014/Makona-J0163, partial genome |
| AJP14202 | Sierra | Nov. 9, 2014 | Mar. 1, 2015 | Zaire ebolavirus isolate Ebolavirus/H.sapiens- |
| | Leone | | | wt/SLE/2014/Makona-J0164, partial genome |
| AJP14921 | Sierra | Nov. 8, 2014 | Mar. 1, 2015 | Zaire ebolavirus isolate Ebolavirus/H.sapiens- |
| | Leone | | | wt/SLE/2014/Makona-J0165, partial genome |
| AJP14930 | Sierra | Nov. 8, 2014 | Mar. 1, 2015 | Zaire ebolavirus isolate Ebolavirus/H.sapiens- |
| | Leone | | | wt/SLE/2014/Makona-J0166, partial genome |
| AJP14211 | Sierra | Nov. 8, 2014 | Mar. 1, 2015 | Zaire ebolavirus isolate Ebolavirus/H.sapiens- |
| | Leone | | | wt/SLE/2014/Makona-J0167, partial genome |
| AJP14939 | Sierra | Nov. 11, 2014 | Mar. 1, 2015 | Zaire ebolavirus isolate Ebolavirus/H.sapiens- |
| | Leone | | | wt/SLE/2014/Makona-J0168, partial genome |
| AJP14948 | Sierra | Nov. 9, 2014 | Mar. 1, 2015 | Zaire ebolavirus isolate Ebolavirus/H.sapiens- |
| | Leone | | | wt/SLE/2014/Makona-J0169, partial genome |
| AJP14220 | Sierra | Nov. 10, 2014 | Mar. 1, 2015 | Zaire ebolavirus isolate Ebolavirus/H.sapiens- |
| | Leone | | | wt/SLE/2014/Makona-J0170, partial genome |
| AJP14957 | Sierra | Nov. 10, 2014 | Mar. 1, 2015 | Zaire ebolavirus isolate Ebolavirus/H.sapiens- |
| | Leone | | | wt/SLE/2014/Makona-J0171, partial genome |
| AJP14229 | Sierra | Nov. 11, 2014 | Mar. 1, 2015 | Zaire ebolavirus isolate Ebolavirus/H.sapiens- |
| | Leone | | | wt/SLE/2014/Makona-J0172, partial genome |
| AJP14238 | Sierra | Nov. 11, 2014 | Mar. 1, 2015 | Zaire ebolavirus isolate Ebolavirus/H.sapiens- |
| | Leone | | | wt/SLE/2014/Makona-J0173, partial genome |
| AJP14966 | Sierra | Nov. 11, 2014 | Mar. 1, 2015 | Zaire ebolavirus isolate Ebolavirus/H.sapiens- |
| | Leone | | | wt/SLE/2014/Makona-J0174, partial genome |
| AJP14975 | Sierra | Nov. 11, 2014 | Mar. 1, 2015 | Zaire ebolavirus isolate Ebolavirus/H.sapiens- |
| | Leone | | | wt/SLE/2014/Makona-J0175, partial genome |
| AIW47453 | Guinea | 2014 March | Nov. 10, 2014 | Zaire ebolavirus isolate H.sapiens- |
| | | | | tc/GIN/14/WPG-C05, complete genome |
| AIW47461 | Guinea | 2014 March | Nov. 10, 2014 | Zaire ebolavirus isolate H.sapiens- |
| | | | | tc/GIN/14/WPG-C07, complete genome |
| AIW47469 | Guinea | 2014 March | Nov. 10, 2014 | Zaire ebolavirus isolate H.sapiens- |
| | | | | tc/GIN/14/WPG-C15, complete genome |
| ALH21455 | Guinea | 2014 | Oct. 10, 2015 | Zaire ebolavirus isolate H.sapiens- |
| | | | | wt/GIN/2014/Makona-Conakry-CREMS-1022, |
| | | | | complete genome |
| ALH21464 | Guinea | 2014 | Oct. 10, 2015 | Zaire ebolavirus isolate H.sapiens- |
| | | | | wt/GIN/2014/Makona-Conakry-CREMS-2214, |
| | | | | complete genome |
| AHX24668 | Guinea | 2014 | Apr. 18, 2014 | Zaire ebolavirus isolate H.sapiens- |
| | | | | wt/GIN/2014/Makona-Gueckedou-C05, complete |
| | | | | genome |
| AHX24659 | Guinea | 2014 | Apr. 18, 2014 | Zaire ebolavirus isolate H.sapiens- |
| | | | | wt/GIN/2014/Makona-Gueckedou-C07, complete |
| | | | | genome |
| AHX24650 | Guinea | 2014 | Apr. 18, 2014 | Zaire ebolavirus isolate H.sapiens- |
| | | | | wt/GIN/2014/Makona-Kissidougou-C15, |
| | | | | complete genome |
| AJT59735 | Democratic | 2003 | Mar. 17, 2015 | Zaire ebolavirus isolate Kelle 1 NP protein (NP), |
| | Republic of | | | VP35 protein (VP35), VP40 protein (VP40), GP |
| | the Congo | | | protein (GP), VP30 protein (VP30), VP24 protein |
| | | | | (VP24), and L protein (L) genes, complete cds |
| AER59717 | Democratic | Aug. 31, 2007 | Nov. 7, 2011 | Zaire ebolavirus isolate M-M, partial genome |
| | Republic of | | | |
| | the Congo | | | |
| AKI84266 | Democratic | 1995 | Jun. 2, 2015 | Zaire ebolavirus isolate Zaire ebolavirus H. |
| | Republic of | | | sapiens-tc/ZAI/1995/Zaire-199510621, partial |
| | the Congo | | | genome |
| AKI84257 | Sierra | 2014 | Jun. 2, 2015 | Zaire ebolavirus isolate Zaire |
| | Leone | | | ebolavirus/H.sapiens-tc/SL/2014/Makona- |
| | | | | SL3864.1, partial genome |

TABLE 10
Marburg Amino Acid Sequences

| SEQ | |
|---|---|
| ID | |
| NO. | Description |
| 57 | Marburg_GP12_Musoke1980_HuIgGk |
| 58 | Marburg_GP12_Musoke1980_HuIgGk without signal sequence |
| 59 | Marburg_GP12_Ravn1987_HuIgGk |
| 60 | Marburg_GP12_Ravn1987_HuIgGk without signal sequence |
| 61 | Marburg_GP12_Uganda2007_HuIgGk |
| 62 | Marburg_GP12_Uganda2007_HuIgGk without signal sequence |
| 63 | Musoke\|NA |
| 64 | M/S.Africa/Johannesburg/1975/Ozolin\|NA |
| 65 | pp3_guinea_pig_lethal_variant\|NA |
| 66 | pp4_guinea_pig_nonlethal_variant\|NA |
| 67 | Popp\|NA |
| 68 | Musoke\|NA_1 |
| 69 | M/S.Africa/Johannesburg/1975/Ozolin\|NA_1 |
| 70 | M/Germany/Marburg/1967/Ratayczak\|NA |
| 71 | M/Kenya/Kitum_Cave/1987/Ravn\|NA |
| 72 | Popp\|NA_1 |
| 73 | Marburg_virus/H.sapiens_tc/KEN/1980/Mt._Elgon_Musoke\|NA |
| 74 | Germany_{——}Marburg\|1967 |
| 75 | Ci67\|1967 |
| 76 | Ci67\|1967_1 |
| 77 | Ci67\|1967_2 |
| 78 | Kenya\|1987 |
| 79 | Ravn\|1987 |
| 80 | R2\|1987 |
| 81 | R3\|1987 |
| 82 | R1\|1987 |
| 83 | Ravn_virus/H.sapiens_tc/KEN/1987/Kitum_Cave_810040\|1987 |
| 84 | Ravn_virus/H._sapiens_tc/KEN/1987/Ravn_CDC811103\|08/19/ |
| | 1987 |
| 85 | MARV/H.sapiens_tc/COD/1999/03_DRC\|1999 |
| 86 | MARV/H.sapiens_tc/COD/1999/01_DRC\|1999 |
| 87 | MARV/H.sapiens_tc/COD/1999/06_DRC\|1999 |
| 88 | MARV/H.sapiens_tc/COD/1999/02_DRC\|1999 |
| 89 | MARV/H.sapiens_tc/COD/1999/03_DRC\|1999 |
| 90 | MARV/H.sapiens_tc/COD/1999/05_DRC\|1999 |
| 91 | MARV/H.sapiens_tc/COD/2000/14_DRC\|2000 |
| 92 | 09DRC99\|05/1999 |
| 93 | MARV/H.sapiens_tc/COD/2000/25_DRC\|2000 |
| 94 | MARV/H.sapiens_tc/COD/2000/28_DRC\|2000 |
| 95 | 05DRC99\|05/1999 |
| 96 | MARV/H.sapiens_tc/COD/2000/19_DRC\|2000 |
| 97 | 07DRC99\|05/1999 |
| 98 | MARV/H.sapiens_tc/COD/2000/18_DRC\|2000 |
| 99 | MARV/H.sapiens_tc/COD/2000/17_DRC\|2000 |
| 100 | MARV/H.sapiens_tc/COD/2000/16_DRC\|2000 |
| 101 | MARV/H.sapiens_tc/COD/2000/29_DRC\|2000 |
| 102 | MARV/H.sapiens_tc/COD/2000/30_DRC\|2000 |
| 103 | MARV/H.sapiens_tc/COD/2000/32_DRC\|2000 |
| 104 | MARV/H.sapiens_tc/COD/2000/21_DRC\|2000 |
| 105 | MARV/H.sapiens_tc/COD/2000/20_DRC\|2000 |
| 106 | MARV/H.sapiens_tc/COD/2000/24_DRC\|2000 |
| 107 | MARV/H.sapiens_tc/COD/2000/13_DRC\|2000 |
| 108 | MARV/H.sapiens_tc/COD/2000/15_DRC\|2000 |
| 109 | MARV/H.sapiens_tc/COD/2000/26_DRC\|2000 |
| 110 | MARV/H.sapiens_tc/COD/2000/34_DRC\|2000 |
| 111 | MARV/H.sapiens_tc/COD/2000/22_DRC\|2000 |
| 112 | MARV/H.sapiens_tc/COD/2000/33_DRC\|2000 |
| 113 | MARV/H.sapiens_tc/COD/2000/27_DRC\|2000 |
| 114 | MARV/H.sapiens_tc/COD/2000/23_DRC\|2000 |
| 115 | Ang1386\|03/2005 |
| 116 | Ang1381\|03/2005 |
| 117 | Marburg_virus/H.sapiens_tc/AGO/2005/Angola_200501379\|03/ |
| | 13/2005 |
| 118 | Marburg_virus/H.sapiens_tc/AGO/2005/Angola_810820\|03/13/ |
| | 2005 |
| 119 | Ang0215\|04/2005 |
| 120 | Ang0214\|04/2005 |
| 121 | Ang0126\|04/2005 |
| 122 | Ang0754\|04/2005 |
| 123 | Ang0998\|05/2005 |
| 124 | Uganda_02Uga07\|2007 |
| 125 | Uganda_01Uga07\|2007 |
| 126 | MARV/R.aegyptiacus_tc/UGA/2008/164_Qbat\|2008 |
| 127 | MARV/R.aegyptiacus_tc/UGA/2008/53_Qbat\|2008 |
| 128 | Leiden\|2008 |
| 129 | RAVV/R.aegyptiacus_tc/UGA/2009/1304_Qbat\|2009 |
| 130 | MARV/R.aegyptiacus_tc/UGA/2009/1328_Qbat\|2009 |
| 131 | MARV/R.aegyptiacus_tc/UGA/2009/843_Qbat\|2009 |
| 132 | MARV/R.aegyptiacus_tc/UGA/2009/1175_Qbat\|2009 |
| 133 | MARV/R.aegyptiacus_tc/UGA/2009/914_Qbat\|2009 |
| 134 | NML/M.musculus_lab/AGO/2005/Ang_MA_P2\|01/15/2014 |

TABLE 11
Marburg DNA Sequences

| SEQ | |
|---|---|
| ID | |
| NO. | Description |
| 135 | Marburg_GP12_Musoke1980_HuIgGk - ORF |
| 136 | Marburg_GP12_Ravn1987_HuIgGk - ORF |
| 137 | Marburg_GP12_Uganda2007_HuIgGk - ORF |
| 166 | From 5′ end to 3′ end: 5′ UTR SEQ ID NO: 142, DNA ORF SEQ |
| | ID NO: 135, and 3′ UTR SEQ ID NO: 143 |
| 167 | From 5′ end to 3′ end: 5′ UTR SEQ ID NO: 144, DNA ORF SEQ |
| | ID NO: 135, and 3′ UTR SEQ ID NO: 143 |
| 168 | From 5′ end to 3′ end: 5′ UTR SEQ ID NO: 142, DNA ORF SEQ |
| | ID NO: 136, and 3′ UTR SEQ ID NO: 143 |
| 169 | From 5′ end to 3′ end: 5′ UTR SEQ ID NO: 144, DNA ORF SEQ |
| | ID NO: 136, and 3′ UTR SEQ ID NO: 143 |
| 170 | From 5′ end to 3′ end: 5′ UTR SEQ ID NO: 142, DNA ORF SEQ |
| | ID NO: 137, and 3′ UTR SEQ ID NO: 143 |
| 171 | From 5′ end to 3′ end: 5′ UTR SEQ ID NO: 144, DNA ORF SEQ |
| | ID NO: 137, and 3′ UTR SEQ ID NO: 143 |

TABLE 12
Marburg RNA Sequences

| SEQ | |
|---|---|
| ID | |
| NO. | Description |
| 138 | Marburg_GP12_Musoke1980_HuIgGk - ORF |
| 139 | Marburg_GP12_Ravn1987_HuIgGk - ORF |
| 140 | Marburg_GP12_Uganda2007_HuIgGk - ORF |
| 172 | From 5′ end to 3′ end: 5′ UTR SEQ ID NO: 163, RNA ORF SEQ |
| | ID NO: 138, and 3′ UTR SEQ ID NO: 164 |
| 173 | From 5′ end to 3′ end: 5′ UTR SEQ ID NO: 165, RNA ORF SEQ |
| | ID NO: 138, and 3′ UTR SEQ ID NO: 164 |
| 174 | From 5′ end to 3′ end: 5′ UTR SEQ ID NO: 163, RNA ORF SEQ |
| | ID NO: 139, and 3′ UTR SEQ ID NO: 164 |
| 175 | From 5′ end to 3′ end: 5′ UTR SEQ ID NO: 165, RNA ORF SEQ |
| | ID NO: 139, and 3′ UTR SEQ ID NO: 164 |
| 176 | From 5′ end to 3′ end: 5′ UTR SEQ ID NO: 163, RNA ORF SEQ |
| | ID NO: 140, and 3′ UTR SEQ ID NO: 164 |
| 177 | From 5′ end to 3′ end: 5′ UTR SEQ ID NO: 165, RNA ORF SEQ |
| | ID NO: 140, and 3′ UTR SEQ ID NO: 164 |

### EQUIVALENTS

[0467] Those skilled in the art will recognize, or be able to ascertain using no more than routine experimentation, many equivalents to the specific embodiments of the disclosure described herein. Such equivalents are intended to be encompassed by the following claims.

[0468] All references, including patent documents, disclosed herein are incorporated by reference in their entirety.

1.-2. (canceled)

3. An Ebola virus (EBOV) vaccine, comprising:
at least one ribonucleic acid (RNA) polynucleotide having an open reading frame encoding at least one EBOV antigenic polypeptide or an immunogenic fragment thereof.

4. The vaccine of claim 3, wherein the at least one antigenic polypeptide is selected from EBOV glycoprotein (GP), surface EBOV GP, wild type EBOV GP, mature EBOV GP, secreted wild type EBOV GP, secreted mature EBOV GP, sGP, delta peptide (Δ-peptide), GP1, GP1,2Δ, nucleoprotein NP, viral polymerase L, the polymerase cofactor VP35, the transcriptional activator VP30, VP24, and the matrix protein VP40.

5. The vaccine of claim 3, wherein the vaccine comprises at least one RNA polynucleotide having an open reading frame encoding at least two antigenic polypeptides or immunogenic fragments thereof selected from EBOV glycoprotein (GP), surface EBOV GP, wild type EBOV GP, mature EBOV GP, secreted wild type EBOV GP, secreted mature EBOV GP, sGP, delta peptide (Δ-peptide), GP1, GP1,2Δ, nucleoprotein NP, viral polymerase L, the polymerase cofactor VP35, the transcriptional activator VP30, VP24, and the matrix protein VP40.

6.-8. (canceled)

9. The vaccine of claim 4, wherein the vaccine comprises at least two RNA polynucleotides, each having an open reading frame encoding at least one antigenic polypeptide or an immunogenic fragment thereof selected from EBOV glycoprotein (GP), surface EBOV GP, wild type EBOV GP, sGP, delta peptide (Δ-peptide), GP1, and GP1,2A, wherein the EBOV antigenic polypeptide encoded by one of the open reading frames differs from the EBOV antigenic polypeptide encoded by another of the open reading frames.

10. The vaccine of claim 9, wherein the at least one antigenic polypeptide comprises an amino acid sequence identified by any one of SEQ ID NO: 9-16, 26, 46, 47, 50, 51, 54, 55.

11. The vaccine of claim 10, wherein the at least one RNA polynucleotide is encoded by a nucleic acid sequence identified by any one of SEQ ID NO: 1-8, 17-24, 27, 36, 37, 45, 49, 53, and/or wherein the at least one RNA polynucleotide comprises a nucleic acid sequence identified by any one of SEQ ID NO: 28-44, 48, 52, 56.

12. The vaccine of claim 10, wherein the at least one antigenic polypeptide has an amino acid sequence that has at least 95% identity to an amino acid sequence identified by any one of SEQ ID NO: 9-16, 26, 46, 47, 50, 51, 54, 55.

13. (canceled)

14. The vaccine of claim 10, wherein the at least one antigenic polypeptide has an amino acid sequence that has at least 90% identity to an amino acid sequence of SEQ ID NO: 9-16, 26, 46, 47, 50, 51, 54, 55 and wherein the antigenic polypeptide or immunogenic fragment thereof has membrane fusion activity, attaches to cell receptors, causes fusion of viral and cellular membranes, and/or is responsible for binding of the virus to a cell being infected.

15.-43. (canceled)

44. The vaccine of claim 3, wherein the at least one RNA polynucleotide comprises at least one chemical modification.

45. The vaccine of claim 44, wherein the chemical modification is selected from pseudouridine, N1-methylpseudouridine, N1-ethylpseudouridine, 2-thiouridine, 4′-thiouridine, 5-methylcytosine, 5-methyluridine, 2-thio-1-methyl-1-deaza-pseudouridine, 2-thio-1-methyl-pseudouridine, 2-thio-5-aza-uridine, 2-thio-dihydropseudouridine, 2-thio-dihydrouridine, 2-thio-pseudouridine, 4-methoxy-2-thio-pseudouridine, 4-methoxy-pseudouridine, 4-thio-1-methyl-pseudouridine, 4-thio-pseudouridine, 5-aza-uridine, dihydropseudouridine, 5-methoxyuridine and 2′-O-methyl uridine.

46. The vaccine of claim 45, wherein the chemical modification is in the 5-position of the uracil.

47. The vaccine of claim 46, wherein the chemical modification is a N1-methylpseudouridine or N1-ethylpseudouridine.

48. The vaccine of claim 46, wherein at least 80% of the uracil in the open reading frame have a chemical modification.

49. The vaccine of claim 46, wherein at least 90% of the uracil in the open reading frame have a chemical modification.

50. The vaccine of claim 46, wherein 100% of the uracil in the open reading frame have a chemical modification.

51. The vaccine of claim 3, wherein at least one RNA polynucleotide further encodes at least one 5′ terminal cap.

52. The vaccine of claim 51, wherein the 5′ terminal cap is 7mG(5′)ppp(5′)NlmpNp.

53. The vaccine of claim 3, wherein at least one antigenic polypeptide or immunogenic fragment thereof is fused to a signal peptide selected from: a HuIgGk signal peptide (METPAQLLFLLLLWLPDTTG; SEQ ID NO: 178); IgE heavy chain epsilon-1 signal peptide (MDWTWILFLVAAATRVHS; SEQ ID NO: 179); Japanese encephalitis PRM signal sequence (MLGSNSGQRVVFTILLLLVAPAYS; SEQ ID NO: 180), VSVg protein signal sequence (MKCLLYLAFLFIGVNCA; SEQ ID NO: 181) and Japanese encephalitis JEV signal sequence (MWLVSLAIVTACAGA; SEQ ID NO: 182).

54. The vaccine of claim 53, wherein the signal peptide is fused to the N-terminus of at least one antigenic polypeptide.

55. The vaccine of claim 53, wherein the signal peptide is fused to the C-terminus of at least one antigenic polypeptide.

56. The vaccine of claim 3, wherein the antigenic polypeptide or immunogenic fragment thereof comprises a mutated N-linked glycosylation site.

57. The vaccine of claim 3 formulated in a nanoparticle.

58. The vaccine of claim 57, wherein the nanoparticle is a lipid nanoparticle.

59. The vaccine of claim 58, wherein the nanoparticle has a mean diameter of 50-200 nm.

60. The vaccine of claim 58, wherein the lipid nanoparticle comprises a cationic lipid, a PEG-modified lipid, a sterol and a non-cationic lipid.

61. The vaccine of claim 60, wherein the lipid nanoparticle carrier comprises a molar ratio of about 20-60% cationic lipid, 0.5-15% PEG-modified lipid, 25-55% sterol, and 25% non-cationic lipid.

62. The vaccine of claim 61, wherein the cationic lipid is an ionizable cationic lipid and the non-cationic lipid is a neutral lipid, and the sterol is a cholesterol.

63. The vaccine of claim 61, wherein the cationic lipid is selected from 2,2-dilinoleyl-4-dimethylaminoethyl-[1,3]-dioxolane (DLin-KC2-DMA), dilinoleyl-methyl-4-dimethylaminobutyrate (DLin-MC3-DMA), and di((Z)-non-2-en-1-yl) 9-((4-(dimethylamino)butanoyl)oxy)heptadecanedioate (L319).

64. The vaccine of claim 1, wherein the lipid nanoparticle comprises a compound of Formula (I), optionally Compound 3, 18, 20, 25, 26, 29, 30, 60, 108-112, or 122.

65.-67. (canceled)

68. The vaccine of claim 1, further comprising an adjuvant.

69.-73. (canceled)

74. A method of inducing an immune response in a subject, the method comprising administering to the subject the vaccine of claim 3 in an amount effective to produce an antigen-specific immune response in the subject.

75.-99. (canceled)

100. An engineered nucleic acid encoding at least one RNA polynucleotide of a vaccine of claim 3.

101. A pharmaceutical composition for use in vaccination of a subject comprising an effective dose of mRNA encoding an Ebola virus antigen, wherein the effective dose is sufficient to produce detectable levels of antigen as measured in serum of the subject at 1-72 hours post administration.

102. A pharmaceutical composition for use in vaccination of a subject comprising an effective dose of mRNA encoding an Ebola virus antigen, wherein the effective dose is sufficient to produce a 1,000-10,000 neutralization titer produced by neutralizing antibody against said antigen as measured in serum of the subject at 1-72 hours post administration.

103. A vaccine comprising an mRNA encoding an Ebola virus antigen formulated in a lipid nanoparticle comprising compounds of Formula (I): [chemical structure]
or a salt or isomer thereof, wherein:
R₁ is selected from the group consisting of C₅₋₃₀ alkyl, C₅₋₂₀ alkenyl, —R*YR″, —YR″, and —R″M′R′;
R₂ and R₃ are independently selected from the group consisting of H, C₁₋₁₄ alkyl, C₂₋₁₄ alkenyl, —R*YR″, —YR″, and —R*OR″, or R₂ and R₃, together with the atom to which they are attached, form a heterocycle or carbocycle;
R₄ is selected from the group consisting of a C₃₋₆ carbocycle, —(CH₂)ₙQ, —(CH₂)ₙCHQR, —CHQR, —CQ(R)₂, and unsubstituted C₁₋₆ alkyl, where Q is selected from a carbocycle, heterocycle, —OR, —O(CH₂)ₙN(R)₂, —C(O)OR, —OC(O)R, —CX₃, —CX₂H, —CXH₂, —CN, —N(R)₂, —C(O)N(R)₂, —N(R)C(O)R, —N(R)S(O)₂R, —N(R)C(O)N(R)₂, —N(R)C(S)N(R)₂, —N(R)R₈, —O(CH₂)ₙOR, —N(R)C(═NR₉)N(R)₂, —N(R)C(═CHR₉)N(R)₂, —OC(O)N(R)₂, —N(R)C(O)OR, —N(OR)C(O)R, —N(OR)S(O)₂R, —N(OR)C(O)OR, —N(OR)C(O)N(R)₂, —N(OR)C(S)N(R)₂, —N(OR)C(═NR₉)N(R)₂, —N(OR)C(═CHR₉)N(R)₂, —C(═NR₉)N(R)₂, —C(═NR₉)R, —C(O)N(R)OR, and —C(R)N(R)₂C(O)OR, and each n is independently selected from 1, 2, 3, 4, and 5;
each R₅ is independently selected from the group consisting of C₁₋₃ alkyl, C₂₋₃ alkenyl, and H;
each R₆ is independently selected from the group consisting of C₁₋₃ alkyl, C₂₋₃ alkenyl, and H;
M and M′ are independently selected from —C(O)O—, —OC(O)—, —C(O)N(R′)—, —N(R′)C(O)—, —C(O)—, —C(S)—, —C(S)S—, —SC(S)—, —CH(OH)—, —P(O)(OR′)O—, —S(O)₂—, —S—S—, an aryl group, and a heteroaryl group;
R₇ is selected from the group consisting of C₁₋₃ alkyl, C₂₋₃ alkenyl, and H;
R₈ is selected from the group consisting of C₃₋₆ carbocycle and heterocycle;
R₉ is selected from the group consisting of H, CN, NO₂, C₁₋₆ alkyl, —OR, —S(O)₂R, —S(O)₂N(R)₂, C₂₋₆ alkenyl, C₃₋₆ carbocycle and heterocycle;
each R is independently selected from the group consisting of C₁₋₃ alkyl, C₂₋₃ alkenyl, and H;
each R′ is independently selected from the group consisting of C₁₋₁₈ alkyl, C₂₋₁₈ alkenyl, —R*YR″, —YR″, and H;
each R″ is independently selected from the group consisting of C₃₋₁₄ alkyl and C₃₋₁₄ alkenyl;
each R* is independently selected from the group consisting of C₁₋₁₂ alkyl and C₂₋₁₂ alkenyl;
each Y is independently a C₃₋₆ carbocycle;
each X is independently selected from the group consisting of F, Cl, Br, and I; and
m is selected from 5, 6, 7, 8, 9, 10, 11, 12, and 13.

104.-130. (canceled)

The application's sequence listing, which the Patent Office published only in electronic form, follows.

SEQUENCE LISTING (183 sequences)

SEQ ID NO: 1 - DNA, 1992 bp, Artificial Sequence
  Synthetic polynucleotide
atggagactccagcccagctgctgttcttactcttactctggctgcctgataccacgggaataccgttaggcgttattcataattcgacactccaggtgtcagacgtggataagctggtctgccgcgataagctgagtagtacgaaccagctgagatccgtcggtctaaaccttgagggaaatggtgtggccactgacgtccccagcgcgaccaagcggtgggggttcaggtctggtgtcccacctaaagtagtgaactacgaagcaggtgagtgggcagaaaactgctacaacttagaaatcaaaaagccagatggatctgaatgcctgcccgccgcgccagatgggatccgcggcttcccaaggtgccgctacgtacacaaggtgagcggaaccgggccttgtgccggggatttcgcttttcataaagagggggcgttctttttgtatgatagattggcgagcaccgttatctaccgcggtaccaccttcgccgaaggcgtggtggcctttcttatcctgcctcaggccaaaaaggacttcttctccagtcacccgttgcgcgaacccgtcaatgctaccgaggacccatcttcaggatactattccaccactatacgctatcaggccacaggcttcgggaccaatgaaactgagtacctctttgaggtcgacaaccttacatatgtccaactcgaatcacgcttcactcctcaatttctgcttcagttgaacgagacaatatatacatcaggcaagcgatctaatactaccggcaagctgatatggaaggtgaatccagagatcgataccacaatcggcgagtgggccttttgggagactaagaaaaacttgactcgcaaaatccggagtgaggagctgagtttcactgtggtgtctaatggtgcgaagaatataagcggccaatcccctgctaggacctcttcggatcccggtacgaacacaacaactgaggaccacaagattatggccagcgaaaattctagcgcaatggtacaggtgcattcacagggccgggaggcggcagtctctcacctaacgacactggcgaccatatcgacctctccacagtcactgacaactaagcctggacccgataattccacacacaacacccccgtctacaagttagatatatctgaggcaactcaagtagaacaacatcaccggcgcacagacaatgactccaccgcctctgacacccctagcgccactacggcagcagggccacctaaggcagagaacaccaacacatcgaaatcaaccgactttctggacccggcaactaccacatctccccagaatcattcagaaacagccggaaacaataatacacatcaccaagatacaggcgaggagagtgccagctccggaaagttgggtctcataaccaacacaattgctggcgttgccggccttatcacaggtggcagacggacaaggagagaagctattgtgaacgcccagcctaagtgcaacccaaatctccactactggacgacacaggatgaaggggcagcgatcgggctggcctggataccttactttggacccgcagcagagggcatctatatcgagggcttgatgcacaaccaagacgggctgatctgcggcctgcgccagctggccaacgaaactacacaggccctgcagctgtttctgcgggctacaactgagctccggacttttagtattctgaatcgaaaggccatagatttccttctgcagagatggggtggcacatgtcacatccttggccccgattgctgcatcgaaccccacgattggacaaaaaacattaccgataagatagaccagatcatacacgatttcgttgacaagacattgcccgaccaaggagataatgacaattggtggacaggatggaggcagtggataccagctggcataggcgtgaccggggtcatcatcgcagtgattgccttgttttgcatttgcaagttcgtgttc

SEQ ID NO: 2 - DNA, 2034 bp, Artificial Sequence
  Synthetic polynucleotide
atggagacccccgctcagctcctgtttctgctcctgctatggttaccagatacaactggtattccgctcggtgttatacacaattccacactccaggtctcagatgtagataaattagtttgtcgggataaactgtctagtaccaatcagcttaggtctgtcggtcttaatctcgaaggaaacggcgttgccaccgatgtgcctagcgctacgaagagatggggctttcgaagcggagtgcccccaaaggtggtcaactatgaagctggagaatgggccgagaactgctataacctcgaaataaaaaagcctgacggctctgagtgtctgccagccgccccagatggaattagagggtttccacgatgcaggtacgtacataaagtcagcggcaccggtccatgcgcgggcgactttgcatttcacaaagagggagccttcttcctatacgacaggttagccagcacagtgatatacagggggactacgttcgctgagggcgtcgttgcatttttgattctaccacaagcaaaaaaagactttttcagttctcatcctctgcgagaacccgtaaatgctactgaggacccctcctcaggctactattctaccacaattcgttatcaggcgacaggctttggtactaatgaaaccgagtatcttttcgaagtagacaatctgacgtacgtgcagctcgaatcacgtttcaccccacaattcctcctgcaactcaacgagacaatctatacatccggtaaacgcagtaacactactgggaaactcatctggaaggtgaatcctgagatagacactactatcggcgagtgggcattttgggaaaccaaaaaaaatctgactcgtaagattagatcagaagagttatcctttactgtcgtcagtaatggagccaaaaacatcagtgggcagtccccggctcggacgagctccgaccccggcaccaatacaactactgaagatcataagatcatggcatccgaaaatagttccgccatggtacaggtgcacagccagggcagagaagccgctgtctcacaccttactacgctggctactataagcacctcgcctcaatccctgaccacaaagcctggtcccgacaactccacccataacacccctgtttacaagctggacattagcgaagcaactcaggtcgaacagcatcacaggcgtacagataacgatagcaccgcaagtgataccccatctgccacgaccgccgccggaccccctaaggcagagaacaccaacacatcgaagtcaacagattttcttgacccagccactaccacatcaccccagaatcactctgaaactgctggcaacaataatactcatcaccaggatactggcgaagagagcgccagctctggcaaactgggattgattacaaacacgattgcaggagttgccggtctcatcaccggaggtagaagaacccgccgggaggctattgtgaacgcccagccaaagtgtaaccctaaccttcattactggaccactcaggatgaaggagctgcaattggcctcgcctggattccctacttcggaccagccgccgagggtatttacatcgagggcctcatgcataaccaggatggcctgatctgcggcctaaggcagttggccaacgaaacgacgcaagcgctccagttatttcttcgagcaactacagaactacgcactttttcaatcctgaaccgaaaagccatcgactttctcctgcagagatggggcggcacttgtcacattctggggcctgattgttgtatcgagccacatgactggaccaaaaatatcacggacaagatcgatcagatcattcatgactttgtggataaaacactgccagaccaaggggataacgataactggtggactggctggcggcagtggatccccgcaggtattggggtcactggagtaattatcgccgtgattgctctgttttgcatttgcaagttcgttttcggtaaacccattccaaatcccctactaggcctggacagcaca

SEQ ID NO: 3 - DNA, 1914 bp, Artificial Sequence
  Synthetic polynucleotide
atggaaacaccagcccagctgctgtttctcctgctgttgtggttgccagacactacaggaatcccccttggtgtgattcataactccacgcttcaagtgtcggatgtagacaaacttgtgtgtcgggataagctttcgtctacaaaccaattaagatcggtgggactgaacctggaaggaaatggagtggccactgacgtcccctccgcgaccaaacggtggggatttcggtcaggcgtgccccccaaagtcgtcaattacgaggccggagagtgggcagaaaactgttataacctcgaaatcaagaagcccgatggatcggaatgcttgccggcagcccctgacgggatccgcgggttcccgaggtgcagatacgtgcacaaagtctccggcaccggaccttgcgccggcgacttcgcgtttcacaaagaaggcgcattttttctgtacgatcgacttgcaagcactgttatatatagagggacgacattcgctgaaggcgttgtggcatttctgatactgccccaagctaaaaaggatttttttagctcacatccactacgggaaccggtcaatgctactgaagatccatcaagcggctattattcaaccaccataaggtatcaggcgacaggttttggcactaatgaaaccgagtacctctttgaagtagacaatctcacttacgtgcaacttgagtcccgatttacccctcagtttctgctgcaattaaacgagactatttacacttccggcaaaaggagtaacacgacaggcaaactgatctggaaggtcaaccctgagatcgataccacgattggcgagtgggcattctgggagactaaaaaaaacctgaccaggaagatacggtccgaagagctgtctttcacagtcgttagcaacggtgccaagaacatttccggccagtcccctgcccggacctcgagtgatcccggaaccaatacgacaaccgaggatcataagatcatggccagcgaaaatagcagcgcaatggtacaagttcattcccaagggcgagaagccgcggtgtcccacctgactactctggccactatttccacaagccctcagtcgttaacaaccaaacctgggcctgacaattcaacccataacacacctgtatataagctggatatttcagaggcaacccaagtggaacagcaccataggagaacggacaatgactctacagcctccgacaccccctctgcaacgaccgctgccggaccacccaaggctgaaaacaccaacacatccaagagtaccgattttttggacccggcgaccactacgagtcctcagaatcacagtgaaacggcagggaataacaacacccaccatcaggatacgggcgaagagtctgccagttctggcaagttggggctcatcacgaacaccattgccggggtggctggtcttatcactggaggtcgcaggacgagacgtgaggctatagtgaacgcacagccaaagtgtaatcccaaccttcattactggaccacacaggacgagggagctgcaattgggttggcctggatcccttactttggacccgcagccgaaggcatctacatcgaaggcctaatgcacaatcaggacggccttatctgcggattgcgacagcttgccaatgaaacaacccaggctcttcaactgtttctaagagccacaactgagttgaggacttttagcatcttgaataggaaagccatagacttcttgttacagaggtgggggggcacatgtcacatcctcggacccgactgttgtatagagcctcatgactggaccaagaacatcacagataagattgaccagattatccatgattttgtcgataaaacacttcccgaccaaggggataatgataactggtggaccggctggcgccag

SEQ ID NO: 4 - DNA, 2271 bp, Artificial Sequence
  Synthetic polynucleotide
atggaaacgccagcacaattactttttctgcttttgctgtggctccctgacacaactggacatcaccaccatcatcatggcaaacctatacctaaccctctgctgggtctggactctaccggtgattggaaatgggatggaggcctggtccctcggggctctgatgagatgttgcgagagctgcaggagactaacgcagcactccaggacgtccgcgaacttctccgacagcaggttagacagatcaccttccttagatgtttacttatgggggggagactgctctgcagattggaagagctggagaggcgtctggaagagctggagcggcgccttgaggaactggaacgggccattaatacagttgatgagttggccgccttgaggagacgtctggaggaactagcacgcggctctatacctctaggggttatccataattccacgctccaggttagtgacgttgacaagctggtgtgccgcgataaattatcttccacgaaccagttgagatccgttggactaaatcttgagggaaacggcgttgccacagacgtgccatctgccaccaaaaggtggggtttccgctccggtgtgccccccaaagtggtgaattacgaggcaggggaatgggcggaaaactgttacaatctggaaattaagaagcctgacggcagtgagtgtctgccggccgctcctgacggaataagagggttcccaaggtgtagatacgtgcacaaggtctctggaaccggaccttgcgccggggacttcgccttccacaaagaaggtgcatttttcctatatgaccgcttagcctcgacagtgatttacaggggcaccactttcgcagagggggtagtcgctttcttaattttgcctcaggcgaaaaaggactttttttctagtcaccccctcagggagcctgtaaacgcaaccgaggacccaagtagcggttactactccacaacgatcaggtaccaggccaccggatttggcacaaacgaaacggaatacctatttgaagtcgacaacctgacctacgtccagctggagtcccgattcacgccccagttcctactgcagctgaatgagacaatttacacttctggtaaaagaagtaacaccactggaaaactcatctggaaggtcaatccagaaattgatacaacaatcggtgagtgggctttttgggagacgaaaaaaaacttgaccagaaaaatcaggtccgaggagctgagtttcacggtagttagcaacggagcgaaaaatatctcaggacagagtccagcccgaacctcttcggatccaggcactaatacgacaacagaagaccataagattatggctagtgagaactcatctgctatggtccaggtgcactcgcaaggacgcgaagcagctgtgtcacatctgaccacccttgcaactatcagcacaagtcctcagagcttaaccaccaagcctggtcccgacaattctacacacaatactcctgtttacaaattagacatcagtgaagccacccaggttgaacaacaccaccggcggacggacaatgactcaacggcatctgacaccccatccgccacaacggctgccgggccaccaaaagctgagaataccaacacatcaaagtcaaccgacttcttagaccccgctacaaccacctccccccaaaatcattccgaaactgccggtaacaacaacacccaccaccaggataccggggaggaaagcgccagcagcggcaagctaggcctgatcacaaacacaatcgccggggtcgcaggcctaatcaccggaggcagacgtacacgtcgggaggctattgttaatgcccagcctaaatgcaatccgaatcttcattattggaccacccaggatgaaggagctgccattggactggcttggatcccttactttggccccgccgctgagggaatttatatagaggggctgatgcacaaccaagatggactaatttgtggactccgccagctggccaatgaaaccacccaagctttacaactctttctgagagcaacaacagaacttcggacattttctatattgaatagaaaggctattgatttccttctccagagatggggtggtacctgccacatactcggtccagattgttgcatagaacctcatgactggaccaaaaatattactgacaaaatcgatcagatcattcacgatttcgtggataagacattacccgaccaaggcgacaacgacaactggtggactggatggaggcag

SEQ ID NO: 5 - DNA, 2028 bp, Artificial Sequence
  Synthetic polynucleotide
atgggagtcaccggcattctgcagctccccagggatcgtttcaaaagaacttccttttttctgtgggtaatcatcctgttccaaaggacgttttccatccccctgggagttatacacaacagtacattgcaggtctctgacgtagacaaactcgtctgccgggacaaactttctagcactaatcagctgcggtcggtaggtctgaacttggaaggtaatggtgtcgccacagatgtgccatccgccaccaaacgctgggggttccggtcaggcgtgcccccaaaagtcgtcaactatgaagcaggcgaatgggcggaaaactgttataatctcgagatcaaaaaacctgacgggtccgagtgtttgcccgccgctcctgacggcatcagaggcttccctaggtgcagatatgtccacaaggtatcaggtaccggcccatgtgctggggacttcgctttccacaaggaaggagctttctttctctacgacaggctggcctctaccgtcatatataggggaactaccttcgccgaaggcgttgttgcctttttgatcctgcctcaggccaaaaaagacttcttttcttcccatcccctgcgggagccagttaacgctaccgaggacccgagctctggctattacagtaccaccatccggtatcaagctaccggattcggcacgaacgaaaccgagtacctattcgaggtggacaacctgacatatgttcaactggagtcccggttcaccccccagtttctgctgcagttgaacgagaccatctacacaagcggtaaaaggtctaataccactggaaaactgatctggaaagtaaacccggagatagataccaccattggagaatgggcattctgggagaccaagaaaaatttgaccaggaaaatacgctctgaagaactgtcctttacggtggtgtctaatggggcgaagaacatctccggacagagccctgcgcgcacatcctcagatccaggcacaaataccacaacagaggatcacaagattatggcatctgagaatagcagcgctatggtgcaggttcacagccaaggcagagaggccgcggtttcccatctcacaacattggctactatcagcacctctcctcaaagcctgacaacaaagcctggtccagataattctacccataatactccagtgtataaactcgacatttctgaggctacacaagtggagcagcaccatagaagaacagacaacgactcaactgcctccgacaccccttcagcgacaaccgccgccggccctcctaaggcggaaaacactaatacttcgaaatcaaccgattttctggatccagcgaccaccacctcgcctcagaatcattcggaaacggctggaaataataacacccaccaccaggacaccggcgaagaaagtgccagcagtggcaagctcgggctgatcaccaatactatcgcgggggtggccgggctaattacaggcggcagacggaccaggagagaggccattgtaaacgcccagcctaaatgcaaccccaacctgcattactggaccacccaagacgagggcgccgcaattggtttggcttggatcccctattttggacccgccgccgaagggatttatatcgaaggactgatgcacaaccaggatggccttatttgtgggcttcggcagctggccaatgagacgacacaagcgctgcagttattcttgagagccactaccgagcttaggaccttcagcattctgaatcgcaaggccatcgacttcctgttgcagcgatgggggggtacctgccatattctgggccctgattgctgtatagaaccccacgactggacgaagaatataaccgataaaatagatcagatcatccacgactttgtcgacaaaacactcccagatcagggcgataacgataattggtggaccggctggaggcagtggatcccagcaggaatcggggtgacaggcgttattatcgcggtcatagcactgttttgcatctgcaagttcgtcttt

SEQ ID NO: 6 - DNA, 2070 bp, Artificial Sequence
  Synthetic polynucleotide
atgggggtgacagggatattgcagctgcctcgggatcgcttcaagcgcacctccttttttctgtgggtcatcatcctctttcagcgcacatttagcattccgctcggcgtaattcataattcaactctacaagtctctgacgtggacaaattggtctgccgggacaagttgtcttcgacaaaccaattgaggtctgtagggctgaacctcgagggcaatggtgtggcgacggatgtaccctcggccaccaagcgttggggctttaggtctggcgtcccccctaaagtggtgaactatgaagctggggaatgggccgaaaattgctacaatctggaaattaagaaacctgacggaagcgagtgtctcccagctgccccagacggtatccgcgggttccccagatgcaggtacgttcataaagtgagtggaaccggcccatgcgccggagatttcgcattccacaaggaaggtgctttctttctttacgacaggctagcctccacagtgatctatcgcggcaccaccttcgcagagggcgtggttgcctttttgatcctgcctcaggccaaaaaagacttcttcagttctcaccctctgagggaaccagtgaacgccaccgaggacccttccagcggatactacagcaccacgatccgctatcaagcgaccggtttcgggaccaacgagactgagtacctctttgaagtggataacctgacatatgtgcagctggaatctcggtttaccccgcagttccttctccagctgaatgaaactatatacacctcaggcaagagatccaataccacaggtaaattgatttggaaagttaatcccgaaatcgacacaacgattggggagtgggccttttgggagaccaagaaaaatctgacacgcaagatcagaagtgaggagttgagtttcaccgtggtcagcaatggcgcgaaaaatatttccggtcaatctccagccaggactagctctgaccctggaacgaacactaccacagaagaccataagatcatggcaagtgagaattcttccgctatggttcaggtgcactcccagggccgggaagccgccgtctcacacctgacaaccctcgccacaatctccacttccccacagtccctgacaaccaaacccgggcctgacaactcaacacataatacgccagtttacaagctcgatatctctgaggctacccaggtggagcaacaccacaggcggactgacaacgacagcaccgctagtgataccccctcagccaccactgccgcaggtccccccaaggccgaaaatacaaataccagtaaaagtacggacttcctggaccccgcaactacaacctccccccaaaaccacagcgaaacggcagggaataataatacacaccatcaggataccggagaggagtccgcttcttccggcaagctgggactgataaccaacacaattgccggagtggcaggtctgattacgggagggcgcaggactagacgggaagcaatcgtgaacgcacagccaaagtgcaatcctaacctgcactactggactacccaagatgaaggggcagccattgggcttgcatggatcccctactttgggcctgcagcggaggggatttatatcgaaggcctgatgcataatcaggatggattgatttgcgggctcaggcagttggcgaatgaaacaacacaagccctacaattatttctgagggccactactgagttgcgaacatttagtatcctcaatagaaaggccatagacttcctgctccagcgctggggcgggacttgccacattctaggcccggactgttgtatcgaaccccatgactggaccaagaacataactgataagatagaccagatcatccatgatttcgttgataaaacactgcccgatcagggtgacaacgacaattggtggactggctggaggcagtggatcccagctggcattggggttacaggtgttataattgccgtgattgctctcttctgcatctgcaaatttgtcttcggtaaaccaatacccaatccactgctgggcctggatagcacg

SEQ ID NO: 7 - DNA, 1950 bp, Artificial Sequence
  Synthetic polynucleotide
atgggagtgactggcattcttcagcttcctcgcgacaggtttaagagaacctcgttcttcctgtgggtcattatacttttccagcgcacattcagcatcccacttggagtgattcataattctacacttcaggttagcgacgtggacaagctggtctgccgggacaaactgtcgtcaacaaatcagcttaggtccgtaggcctgaaccttgaaggtaacggcgttgcaacagatgtgcctagcgcaacgaagcggtggggatttaggtctggtgttccaccaaaagtggtcaattacgaggccggagagtgggcagagaactgctataacctggaaataaaaaagcctgacggtagcgaatgcctgccagccgcgccagatggcattcgggggtttccccgctgtcgctacgtccacaaagtaagtggtactgggccttgtgccggtgacttcgcctttcacaaagagggcgcgttctttttgtatgaccgtctcgcctccacagtaatttaccgaggcactacatttgcagaaggggtggtggcattccttatattaccccaggctaaaaaggacttcttctctagccacccactccgggaaccagtgaatgcaaccgaggatccaagctcggggtactattctaccactatcaggtatcaggcaacagggtttggtacaaatgagactgaatatctcttcgaggttgacaacctgacctacgtgcagctggaaagtcgtttcactccgcagttcctcttgcagctcaatgagaccatatataccagtgggaaacggtctaacacaaccggaaaactgatttggaaagttaacccagaaattgatactacgattggtgagtgggcgttttgggagacaaagaagaatttaactaggaagatcaggtccgaagaactgtcattcactgtggtgtctaacggcgcgaaaaatatctctgggcagtctccagcccgcacatcctccgatcctggaacgaatacaaccaccgaagatcataagatcatggccagcgaaaactcctccgccatggtccaagtccattcccaagggagggaagctgcagtctcccacctcactactttggcaaccattagcacttcgccacaaagcctgaccaccaagcccggcccggataattcaacccacaacaccccagtttataaactggatatcagtgaggcgactcaggtggagcagcatcaccgaagaactgataatgattctactgccagcgacaccccaagcgcgaccaccgctgccggacctcccaaggccgagaatactaacacttcgaaatcaacagactttctggatcccgccacaaccacgtccccacagaatcactctgaaaccgccggtaacaataatacacatcaccaggataccggggaggaatccgcttctagcgggaagctgggccttataacaaatacgatagcaggggtggccggactcatcacagggggtcggaggacacggcgggaggctatagtcaatgctcagcctaaatgcaacccgaatctgcactattggaccacacaggacgagggagccgccatcgggctggcatggattccatatttcggcccagccgctgagggcatctacatcgagggtcttatgcacaaccaggacgggctaatctgcggacttaggcagctggccaacgagacaacacaggcactccagctcttccttcgcgctacaacagagctacggaccttttccattctcaacaggaaggccatagacttcctcttgcagcggtggggaggcacctgtcatattctcgggcccgattgttgtatcgaacctcatgattggaccaaaaatattacagataagattgatcaaatcatccacgatttcgtagataagacactccccgaccagggagacaatgacaactggtggacggggtggcgacag

SEQ ID NO: 8 - DNA, 1992 bp, Artificial Sequence
  Synthetic polynucleotide
atgggcgtgactgggatcctccaactgcctcgcgatagattcaagcgaactagtttctttctatgggtcatcatactcttccagcgaaccttctcaattccactgggagtcattcacaactccaccttgcaagtgtcagatgtggacaagttggtatgccgagacaaactctcttctactaatcagctcaggtctgtggggctgaaccttgaaggtaacggcgtggccacagatgtgccttcggctactaagcgatggggtttccggtccggtgtgcccccgaaggtggtaaattatgaggctggcgagtgggccgaaaactgctataacttggagattaaaaagcctgacggtagcgaatgtttaccagccgctcccgatggaattaggggctttcccagatgtcggtatgtccacaaagtgtctggaactgggccttgtgctggggattttgccttccataaagaaggggccttctttctatacgatcggctggccagtaccgtcatttatcgaggcactactttcgccgaaggcgttgtggcgtttttgattctcccacaggccaagaaagacttcttttcctcacatcctctacgggagccagtaaatgcaaccgaagatccttctagtggctactactccaccactattcggtaccaggctaccggattcggcaccaatgagacagaatatttatttgaggtggacaaccttacttatgtgcagttggaaagcaggttcaccccccagttcctcctgcagttgaacgagacaatttatacatcaggtaagcggtctaacactaccggtaagttaatctggaaagtgaaccccgagatcgacacgaccatcggggaatgggctttttgggagaccaagaaaaacctgacgcgcaagattagatccgaggagctcagtttcactgtggtgagtaatggcgctaaaaatatcagtgggcagagccccgcccggacaagcagcgaccctgggacaaacactacaaccgaagaccacaaaataatggcctcagaaaacagtagcgcgatggtgcaagtgcatagccaaggacgcgaagccgctgtatcccatcttaccaccctggctacgattagcacctcgccccagtctctgactacgaagccagggcctgacaattctacacacaacacacccgtgtacaaacttgacatctcagaagcaacgcaggtggaacagcatcaccgccggacggataacgacagcaccgcaagcgatacccccagtgctactactgcagccggtcccccaaaagcagaaaatacgaataccagcaagagtacagacttcttggacccggccaccacaacaagcccacaaaatcacagcgagactgcaggcaacaataacacacatcaccaggatacgggggaggaatctgcttcgtccggcaaactcggactgatcacaaatacgatcgccggggtggccggcttgatcaccggcggcaggcggactcggagagaagccatagtgaacgctcagcctaagtgcaatccgaatctacactattggactactcaggacgaaggcgcagctattggcttggcttggattccatactttgggccagcagcagagggaatatacatcgagggactgatgcataaccaggatggcctgatctgtggcctccgacagttggctaatgaaactacccaggccctccaattgttcctgcgcgctacaactgaacttcggaccttttctattttgaacaggaaggccatagatttcctgcttcagcgttggggcggaacatgccatatcctgggccccgactgttgtatcgagcctcatgattggacgaagaatataactgataaaatagatcaaataatccacgacttcgtcgacaagaccctgcctgaccagggggacaatgataactggtggactggatggcgacagggtaagccaatcccgaaccctcttctcggtctggatagcacg

SEQ ID NO: 9 - protein, 664 aa, Artificial Sequence
  Synthetic polypeptide
METPAQLLFLLLLWLPDTTGIPLGVIHNSTLQVSDVDKLVCRDKLSSTNQLRSVGLNLEGNGVATDVPSATKRWGFRSGVPPKVVNYEAGEWAENCYNLEIKKPDGSECLPAAPDGIRGFPRCRYVHKVSGTGPCAGDFAFHKEGAFFLYDRLASTVIYRGTTFAEGVVAFLILPQAKKDFFSSHPLREPVNATEDPSSGYYSTTIRYQATGFGTNETEYLFEVDNLTYVQLESRFTPQFLLQLNETIYTSGKRSNTTGKLIWKVNPEIDTTIGEWAFWETKKNLTRKIRSEELSFTVVSNGAKNISGQSPARTSSDPGTNTTTEDHKIMASENSSAMVQVHSQGREAAVSHLTTLATISTSPQSLTTKPGPDNSTHNTPVYKLDISEATQVEQHHRRTDNDSTASDTPSATTAAGPPKAENTNTSKSTDFLDPATTTSPQNHSETAGNNNTHHQDTGEESASSGKLGLITNTIAGVAGLITGGRRTRREAIVNAQPKCNPNLHYWTTQDEGAAIGLAWIPYFGPAAEGIYIEGLMHNQDGLICGLRQLANETTQALQLFLRATTELRTFSILNRKAIDFLLQRWGGTCHILGPDCCIEPHDWTKNITDKIDQIIHDFVDKTLPDQGDNDNWWTGWRQWIPAGIGVTGVIIAVIALFCICKFVF

SEQ ID NO: 10 - protein, 678 aa, Artificial Sequence
  Synthetic polypeptide
METPAQLLFLLLLWLPDTTGIPLGVIHNSTLQVSDVDKLVCRDKLSSTNQLRSVGLNLEGNGVATDVPSATKRWGFRSGVPPKVVNYEAGEWAENCYNLEIKKPDGSECLPAAPDGIRGFPRCRYVHKVSGTGPCAGDFAFHKEGAFFLYDRLASTVIYRGTTFAEGVVAFLILPQAKKDFFSSHPLREPVNATEDPSSGYYSTTIRYQATGFGTNETEYLFEVDNLTYVQLESRFTPQFLLQLNETIYTSGKRSNTTGKLIWKVNPEIDTTIGEWAFWETKKNLTRKIRSEELSFTVVSNGAKNISGQSPARTSSDPGTNTTTEDHKIMASENSSAMVQVHSQGREAAVSHLTTLATISTSPQSLTTKPGPDNSTHNTPVYKLDISEATQVEQHHRRTDNDSTASDTPSATTAAGPPKAENTNTSKSTDFLDPATTTSPQNHSETAGNNNTHHQDTGEESASSGKLGLITNTIAGVAGLITGGRRTRREAIVNAQPKCNPNLHYWTTQDEGAAIGLAWIPYFGPAAEGIYIEGLMHNQDGLICGLRQLANETTQALQLFLRATTELRTFSILNRKAIDFLLQRWGGTCHILGPDCCIEPHDWTKNITDKIDQIIHDFVDKTLPDQGDNDNWWTGWRQWIPAGIGVTGVIIAVIALFCICKFVFGKPIPNPLLGLDST

SEQ ID NO: 11 - protein, 638 aa, Artificial Sequence
  Synthetic polypeptide
METPAQLLFLLLLWLPDTTGIPLGVIHNSTLQVSDVDKLVCRDKLSSTNQLRSVGLNLEGNGVATDVPSATKRWGFRSGVPPKVVNYEAGEWAENCYNLEIKKPDGSECLPAAPDGIRGFPRCRYVHKVSGTGPCAGDFAFHKEGAFFLYDRLASTVIYRGTTFAEGVVAFLILPQAKKDFFSSHPLREPVNATEDPSSGYYSTTIRYQATGFGTNETEYLFEVDNLTYVQLESRFTPQFLLQLNETIYTSGKRSNTTGKLIWKVNPEIDTTIGEWAFWETKKNLTRKIRSEELSFTVVSNGAKNISGQSPARTSSDPGTNTTTEDHKIMASENSSAMVQVHSQGREAAVSHLTTLATISTSPQSLTTKPGPDNSTHNTPVYKLDISEATQVEQHHRRTDNDSTASDTPSATTAAGPPKAENTNTSKSTDFLDPATTTSPQNHSETAGNNNTHHQDTGEESASSGKLGLITNTIAGVAGLITGGRRTRREAIVNAQPKCNPNLHYWTTQDEGAAIGLAWIPYFGPAAEGIYIEGLMHNQDGLICGLRQLANETTQALQLFLRATTELRTFSILNRKAIDFLLQRWGGTCHILGPDCCIEPHDWTKNITDKIDQIIHDFVDKTLPDQGDNDNWWTGWRQ

SEQ ID NO: 12 - protein, 757 aa, Artificial Sequence
  Synthetic polypeptide
METPAQLLFLLLLWLPDTTGHHHHHHGKPIPNPLLGLDSTGDWKWDGGLVPRGSDEMLRELQETNAALQDVRELLRQQVRQITFLRCLLMGGRLLCRLEELERRLEELERRLEELERAINTVDELAALRRRLEELARGSIPLGVIHNSTLQVSDVDKLVCRDKLSSTNQLRSVGLNLEGNGVATDVPSATKRWGFRSGVPPKVVNYEAGEWAENCYNLEIKKPDGSECLPAAPDGIRGFPRCRYVHKVSGTGPCAGDFAFHKEGAFFLYDRLASTVIYRGTTFAEGVVAFLILPQAKKDFFSSHPLREPVNATEDPSSGYYSTTIRYQATGFGTNETEYLFEVDNLTYVQLESRFTPQFLLQLNETIYTSGKRSNTTGKLIWKVNPEIDTTIGEWAFWETKKNLTRKIRSEELSFTVVSNGAKNISGQSPARTSSDPGTNTTTEDHKIMASENSSAMVQVHSQGREAAVSHLTTLATISTSPQSLTTKPGPDNSTHNTPVYKLDISEATQVEQHHRRTDNDSTASDTPSATTAAGPPKAENTNTSKSTDFLDPATTTSPQNHSETAGNNNTHHQDTGEESASSGKLGLITNTIAGVAGLITGGRRTRREAIVNAQPKCNPNLHYWTTQDEGAAIGLAWIPYFGPAAEGIYIEGLMHNQDGLICGLRQLANETTQALQLFLRATTELRTFSILNRKAIDFLLQRWGGTCHILGPDCCIEPHDWTKNITDKIDQIIHDFVDKTLPDQGDNDNWWTGWRQ

SEQ ID NO: 13 - protein, 676 aa, Artificial Sequence
  Synthetic polypeptide
MGVTGILQLPRDRFKRTSFFLWVIILFQRTFSIPLGVIHNSTLQVSDVDKLVCRDKLSSTNQLRSVGLNLEGNGVATDVPSATKRWGFRSGVPPKVVNYEAGEWAENCYNLEIKKPDGSECLPAAPDGIRGFPRCRYVHKVSGTGPCAGDFAFHKEGAFFLYDRLASTVIYRGTTFAEGVVAFLILPQAKKDFFSSHPLREPVNATEDPSSGYYSTTIRYQATGFGTNETEYLFEVDNLTYVQLESRFTPQFLLQLNETIYTSGKRSNTTGKLIWKVNPEIDTTIGEWAFWETKKNLTRKIRSEELSFTVVSNGAKNISGQSPARTSSDPGTNTTTEDHKIMASENSSAMVQVHSQGREAAVSHLTTLATISTSPQSLTTKPGPDNSTHNTPVYKLDISEATQVEQHHRRTDNDSTASDTPSATTAAGPPKAENTNTSKSTDFLDPATTTSPQNHSETAGNNNTHHQDTGEESASSGKLGLITNTIAGVAGLITGGRRTRREAIVNAQPKCNPNLHYWTTQDEGAAIGLAWIPYFGPAAEGIYIEGLMHNQDGLICGLRQLANETTQALQLFLRATTELRTFSILNRKAIDFLLQRWGGTCHILGPDCCIEPHDWTKNITDKIDQIIHDFVDKTLPDQGDNDNWWTGWRQWIPAGIGVTGVIIAVIALFCICKFVF

SEQ ID NO: 14 - protein, 690 aa, Artificial Sequence
  Synthetic polypeptide
MGVTGILQLPRDRFKRTSFFLWVIILFQRTFSIPLGVIHNSTLQVSDVDKLVCRDKLSSTNQLRSVGLNLEGNGVATDVPSATKRWGFRSGVPPKVVNYEAGEWAENCYNLEIKKPDGSECLPAAPDGIRGFPRCRYVHKVSGTGPCAGDFAFHKEGAFFLYDRLASTVIYRGTTFAEGVVAFLILPQAKKDFFSSHPLREPVNATEDPSSGYYSTTIRYQATGFGTNETEYLFEVDNLTYVQLESRFTPQFLLQLNETIYTSGKRSNTTGKLIWKVNPEIDTTIGEWAFWETKKNLTRKIRSEELSFTVVSNGAKNISGQSPARTSSDPGTNTTTEDHKIMASENSSAMVQVHSQGREAAVSHLTTLATISTSPQSLTTKPGPDNSTHNTPVYKLDISEATQVEQHHRRTDNDSTASDTPSATTAAGPPKAENTNTSKSTDFLDPATTTSPQNHSETAGNNNTHHQDTGEESASSGKLGLITNTIAGVAGLITGGRRTRREAIVNAQPKCNPNLHYWTTQDEGAAIGLAWIPYFGPAAEGIYIEGLMHNQDGLICGLRQLANETTQALQLFLRATTELRTFSILNRKAIDFLLQRWGGTCHILGPDCCIEPHDWTKNITDKIDQIIHDFVDKTLPDQGDNDNWWTGWRQWIPAGIGVTGVIIAVIALFCICKFVFGKPIPNPLLGLDST

SEQ ID NO: 15 - protein, 650 aa, Artificial Sequence
  Synthetic polypeptide
MGVTGILQLPRDRFKRTSFFLWVIILFQRTFSIPLGVIHNSTLQVSDVDKLVCRDKLSSTNQLRSVGLNLEGNGVATDVPSATKRWGFRSGVPPKVVNYEAGEWAENCYNLEIKKPDGSECLPAAPDGIRGFPRCRYVHKVSGTGPCAGDFAFHKEGAFFLYDRLASTVIYRGTTFAEGVVAFLILPQAKKDFFSSHPLREPVNATEDPSSGYYSTTIRYQATGFGTNETEYLFEVDNLTYVQLESRFTPQFLLQLNETIYTSGKRSNTTGKLIWKVNPEIDTTIGEWAFWETKKNLTRKIRSEELSFTVVSNGAKNISGQSPARTSSDPGTNTTTEDHKIMASENSSAMVQVHSQGREAAVSHLTTLATISTSPQSLTTKPGPDNSTHNTPVYKLDISEATQVEQHHRRTDNDSTASDTPSATTAAGPPKAENTNTSKSTDFLDPATTTSPQNHSETAGNNNTHHQDTGEESASSGKLGLITNTIAGVAGLITGGRRTRREAIVNAQPKCNPNLHYWTTQDEGAAIGLAWIPYFGPAAEGIYIEGLMHNQDGLICGLRQLANETTQALQLFLRATTELRTFSILNRKAIDFLLQRWGGTCHILGPDCCIEPHDWTKNITDKIDQIIHDFVDKTLPDQGDNDNWWTGWRQ

SEQ ID NO: 16 - protein, 664 aa, Artificial Sequence
  Synthetic polypeptide
MGVTGILQLPRDRFKRTSFFLWVIILFQRTFSIPLGVIHNSTLQVSDVDKLVCRDKLSSTNQLRSVGLNLEGNGVATDVPSATKRWGFRSGVPPKVVNYEAGEWAENCYNLEIKKPDGSECLPAAPDGIRGFPRCRYVHKVSGTGPCAGDFAFHKEGAFFLYDRLASTVIYRGTTFAEGVVAFLILPQAKKDFFSSHPLREPVNATEDPSSGYYSTTIRYQATGFGTNETEYLFEVDNLTYVQLESRFTPQFLLQLNETIYTSGKRSNTTGKLIWKVNPEIDTTIGEWAFWETKKNLTRKIRSEELSFTVVSNGAKNISGQSPARTSSDPGTNTTTEDHKIMASENSSAMVQVHSQGREAAVSHLTTLATISTSPQSLTTKPGPDNSTHNTPVYKLDISEATQVEQHHRRTDNDSTASDTPSATTAAGPPKAENTNTSKSTDFLDPATTTSPQNHSETAGNNNTHHQDTGEESASSGKLGLITNTIAGVAGLITGGRRTRREAIVNAQPKCNPNLHYWTTQDEGAAIGLAWIPYFGPAAEGIYIEGLMHNQDGLICGLRQLANETTQALQLFLRATTELRTFSILNRKAIDFLLQRWGGTCHILGPDCCIEPHDWTKNITDKIDQIIHDFVDKTLPDQGDNDNWWTGWRQGKPIPNPLLGLDST

SEQ ID NO: 17 - DNA, 2203 bp, Artificial Sequence
  Synthetic polynucleotide
tcaagcttttggaccctcgtacagaagctaatacgactcactatagggaaataagagagaaaagaagagtaagaagaaatataagagccaccatggagactccagcccagctgctgttcttactcttactctggctgcctgataccacgggaataccgttaggcgttattcataattcgacactccaggtgtcagacgtggataagctggtctgccgcgataagctgagtagtacgaaccagctgagatccgtcggtctaaaccttgagggaaatggtgtggccactgacgtccccagcgcgaccaagcggtgggggttcaggtctggtgtcccacctaaagtagtgaactacgaagcaggtgagtgggcagaaaactgctacaacttagaaatcaaaaagccagatggatctgaatgcctgcccgccgcgccagatgggatccgcggcttcccaaggtgccgctacgtacacaaggtgagcggaaccgggccttgtgccggggatttcgcttttcataaagagggggcgttctttttgtatgatagattggcgagcaccgttatctaccgcggtaccaccttcgccgaaggcgtggtggcctttcttatcctgcctcaggccaaaaaggacttcttctccagtcacccgttgcgcgaacccgtcaatgctaccgaggacccatcttcaggatactattccaccactatacgctatcaggccacaggcttcgggaccaatgaaactgagtacctctttgaggtcgacaaccttacatatgtccaactcgaatcacgcttcactcctcaatttctgcttcagttgaacgagacaatatatacatcaggcaagcgatctaatactaccggcaagctgatatggaaggtgaatccagagatcgataccacaatcggcgagtgggccttttgggagactaagaaaaacttgactcgcaaaatccggagtgaggagctgagtttcactgtggtgtctaatggtgcgaagaatataagcggccaatcccctgctaggacctcttcggatcccggtacgaacacaacaactgaggaccacaagattatggccagcgaaaattctagcgcaatggtacaggtgcattcacagggccgggaggcggcagtctctcacctaacgacactggcgaccatatcgacctctccacagtcactgacaactaagcctggacccgataattccacacacaacacccccgtctacaagttagatatatctgaggcaactcaagtagaacaacatcaccggcgcacagacaatgactccaccgcctctgacacccctagcgccactacggcagcagggccacctaaggcagagaacaccaacacatcgaaatcaaccgactttctggacccggcaactaccacatctccccagaatcattcagaaacagccggaaacaataatacacatcaccaagatacaggcgaggagagtgccagctccggaaagttgggtctcataaccaacacaattgctggcgttgccggccttatcacaggtggcagacggacaaggagagaagctattgtgaacgcccagcctaagtgcaacccaaatctccactactggacgacacaggatgaaggggcagcgatcgggctggcctggataccttactttggacccgcagcagagggcatctatatcgagggcttgatgcacaaccaagacgggctgatctgcggcctgcgccagctggccaacgaaactacacaggccctgcagctgtttctgcgggctacaactgagctccggacttttagtattctgaatcgaaaggccatagatttccttctgcagagatggggtggcacatgtcacatccttggccccgattgctgcatcgaaccccacgattggacaaaaaacattaccgataagatagaccagatcatacacgatttcgttgacaagacattgcccgaccaaggagataatgacaattggtggacaggatggaggcagtggataccagctggcataggcgtgaccggggtcatcatcgcagtgattgccttgttttgcatttgcaagttcgtgttctgataataggctggagcctcggtggccatgcttcttgccccttgggcctccccccagcccctcctccccttcctgcacccgtacccccgtggtctttgaataaagtctgagtgggcggc

SEQ ID NO: 18 - DNA, 2245 bp, Artificial Sequence
  Synthetic polynucleotide
tcaagcttttggaccctcgtacagaagctaatacgactcactatagggaaataagagagaaaagaagagtaagaagaaatataagagccaccatggagacccccgctcagctcctgtttctgctcctgctatggttaccagatacaactggtattccgctcggtgttatacacaattccacactccaggtctcagatgtagataaattagtttgtcgggataaactgtctagtaccaatcagcttaggtctgtcggtcttaatctcgaaggaaacggcgttgccaccgatgtgcctagcgctacgaagagatggggctttcgaagcggagtgcccccaaaggtggtcaactatgaagctggagaatgggccgagaactgctataacctcgaaataaaaaagcctgacggctctgagtgtctgccagccgccccagatggaattagagggtttccacgatgcaggtacgtacataaagtcagcggcaccggtccatgcgcgggcgactttgcatttcacaaagagggagccttcttcctatacgacaggttagccagcacagtgatatacagggggactacgttcgctgagggcgtcgttgcatttttgattctaccacaagcaaaaaaagactttttcagttctcatcctctgcgagaacccgtaaatgctactgaggacccctcctcaggctactattctaccacaattcgttatcaggcgacaggctttggtactaatgaaaccgagtatcttttcgaagtagacaatctgacgtacgtgcagctcgaatcacgtttcaccccacaattcctcctgcaactcaacgagacaatctatacatccggtaaacgcagtaacactactgggaaactcatctggaaggtgaatcctgagatagacactactatcggcgagtgggcattttgggaaaccaaaaaaaatctgactcgtaagattagatcagaagagttatcctttactgtcgtcagtaatggagccaaaaacatcagtgggcagtccccggctcggacgagctccgaccccggcaccaatacaactactgaagatcataagatcatggcatccgaaaatagttccgccatggtacaggtgcacagccagggcagagaagccgctgtctcacaccttactacgctggctactataagcacctcgcctcaatccctgaccacaaagcctggtcccgacaactccacccataacacccctgtttacaagctggacattagcgaagcaactcaggtcgaacagcatcacaggcgtacagataacgatagcaccgcaagtgataccccatctgccacgaccgccgccggaccccctaaggcagagaacaccaacacatcgaagtcaacagattttcttgacccagccactaccacatcaccccagaatcactctgaaactgctggcaacaataatactcatcaccaggatactggcgaagagagcgccagctctggcaaactgggattgattacaaacacgattgcaggagttgccggtctcatcaccggaggtagaagaacccgccgggaggctattgtgaacgcccagccaaagtgtaaccctaaccttcattactggaccactcaggatgaaggagctgcaattggcctcgcctggattccctacttcggaccagccgccgagggtatttacatcgagggcctcatgcataaccaggatggcctgatctgcggcctaaggcagttggccaacgaaacgacgcaagcgctccagttatttcttcgagcaactacagaactacgcactttttcaatcctgaaccgaaaagccatcgactttctcctgcagagatggggcggcacttgtcacattctggggcctgattgttgtatcgagccacatgactggaccaaaaatatcacggacaagatcgatcagatcattcatgactttgtggataaaacactgccagaccaaggggataacgataactggtggactggctggcggcagtggatccccgcaggtattggggtcactggagtaattatcgccgtgattgctctgttttgcatttgcaagttcgttttcggtaaacccattccaaatcccctactaggcctggacagcacatgataataggctggagcctcggtggccatgcttcttgccccttgggcctccccccagcccctcctccccttcctgcacccgtacccccgtggtctttgaataaagtctgagtgggcggc

SEQ ID NO: 19 - DNA, 2125 bp, Artificial Sequence
  Synthetic polynucleotide
tcaagcttttggaccctcgtacagaagctaatacgactcactatagggaaataagagagaaaagaagagtaagaagaaatataagagccaccatggaaacaccagcccagctgctgtttctcctgctgttgtggttgccagacactacaggaatcccccttggtgtgattcataactccacgcttcaagtgtcggatgtagacaaacttgtgtgtcgggataagctttcgtctacaaaccaattaagatcggtgggactgaacctggaaggaaatggagtggccactgacgtcccctccgcgaccaaacggtggggatttcggtcaggcgtgccccccaaagtcgtcaattacgaggccggagagtgggcagaaaactgttataacctcgaaatcaagaagcccgatggatcggaatgcttgccggcagcccctgacgggatccgcgggttcccgaggtgcagatacgtgcacaaagtctccggcaccggaccttgcgccggcgacttcgcgtttcacaaagaaggcgcattttttctgtacgatcgacttgcaagcactgttatatatagagggacgacattcgctgaaggcgttgtggcatttctgatactgccccaagctaaaaaggatttttttagctcacatccactacgggaaccggtcaatgctactgaagatccatcaagcggctattattcaaccaccataaggtatcaggcgacaggttttggcactaatgaaaccgagtacctctttgaagtagacaatctcacttacgtgcaacttgagtcccgatttacccctcagtttctgctgcaattaaacgagactatttacacttccggcaaaaggagtaacacgacaggcaaactgatctggaaggtcaaccctgagatcgataccacgattggcgagtgggcattctgggagactaaaaaaaacctgaccaggaagatacggtccgaagagctgtctttcacagtcgttagcaacggtgccaagaacatttccggccagtcccctgcccggacctcgagtgatcccggaaccaatacgacaaccgaggatcataagatcatggccagcgaaaatagcagcgcaatggtacaagttcattcccaagggcgagaagccgcggtgtcccacctgactactctggccactatttccacaagccctcagtcgttaacaaccaaacctgggcctgacaattcaacccataacacacctgtatataagctggatatttcagaggcaacccaagtggaacagcaccataggagaacggacaatgactctacagcctccgacaccccctctgcaacgaccgctgccggaccacccaaggctgaaaacaccaacacatccaagagtaccgattttttggacccggcgaccactacgagtcctcagaatcacagtgaaacggcagggaataacaacacccaccatcaggatacgggcgaagagtctgccagttctggcaagttggggctcatcacgaacaccattgccggggtggctggtcttatcactggaggtcgcaggacgagacgtgaggctatagtgaacgcacagccaaagtgtaatcccaaccttcattactggaccacacaggacgagggagctgcaattgggttggcctggatcccttactttggacccgcagccgaaggcatctacatcgaaggcctaatgcacaatcaggacggccttatctgcggattgcgacagcttgccaatgaaacaacccaggctcttcaactgtttctaagagccacaactgagttgaggacttttagcatcttgaataggaaagccatagacttcttgttacagaggtgggggggcacatgtcacatcctcggacccgactgttgtatagagcctcatgactggaccaagaacatcacagataagattgaccagattatccatgattttgtcgataaaacacttcccgaccaaggggataatgataactggtggaccggctggcgccagtgataataggctggagcctcggtggccatgcttcttgccccttgggcctccccccagcccctcctccccttcctgcacccgtacccccgtggtctttgaataaagtctgagtgggcggc

SEQ ID NO: 20 - DNA, 2482 bp, Artificial Sequence
  Synthetic polynucleotide
tcaagcttttggaccctcgtacagaagctaatacgactcactatagggaaataagagagaaaagaagagtaagaagaaatataagagccaccatggaaacgccagcacaattactttttctgcttttgctgtggctccctgacacaactggacatcaccaccatcatcatggcaaacctatacctaaccctctgctgggtctggactctaccggtgattggaaatgggatggaggcctggtccctcggggctctgatgagatgttgcgagagctgcaggagactaacgcagcactccaggacgtccgcgaacttctccgacagcaggttagacagatcaccttccttagatgtttacttatgggggggagactgctctgcagattggaagagctggagaggcgtctggaagagctggagcggcgccttgaggaactggaacgggccattaatacagttgatgagttggccgccttgaggagacgtctggaggaactagcacgcggctctatacctctaggggttatccataattccacgctccaggttagtgacgttgacaagctggtgtgccgcgataaattatcttccacgaaccagttgagatccgttggactaaatcttgagggaaacggcgttgccacagacgtgccatctgccaccaaaaggtggggtttccgctccggtgtgccccccaaagtggtgaattacgaggcaggggaatgggcggaaaactgttacaatctggaaattaagaagcctgacggcagtgagtgtctgccggccgctcctgacggaataagagggttcccaaggtgtagatacgtgcacaaggtctctggaaccggaccttgcgccggggacttcgccttccacaaagaaggtgcatttttcctatatgaccgcttagcctcgacagtgatttacaggggcaccactttcgcagagggggtagtcgctttcttaattttgcctcaggcgaaaaaggactttttttctagtcaccccctcagggagcctgtaaacgcaaccgaggacccaagtagcggttactactccacaacgatcaggtaccaggccaccggatttggcacaaacgaaacggaatacctatttgaagtcgacaacctgacctacgtccagctggagtcccgattcacgccccagttcctactgcagctgaatgagacaatttacacttctggtaaaagaagtaacaccactggaaaactcatctggaaggtcaatccagaaattgatacaacaatcggtgagtgggctttttgggagacgaaaaaaaacttgaccagaaaaatcaggtccgaggagctgagtttcacggtagttagcaacggagcgaaaaatatctcaggacagagtccagcccgaacctcttcggatccaggcactaatacgacaacagaagaccataagattatggctagtgagaactcatctgctatggtccaggtgcactcgcaaggacgcgaagcagctgtgtcacatctgaccacccttgcaactatcagcacaagtcctcagagcttaaccaccaagcctggtcccgacaattctacacacaatactcctgtttacaaattagacatcagtgaagccacccaggttgaacaacaccaccggcggacggacaatgactcaacggcatctgacaccccatccgccacaacggctgccgggccaccaaaagctgagaataccaacacatcaaagtcaaccgacttcttagaccccgctacaaccacctccccccaaaatcattccgaaactgccggtaacaacaacacccaccaccaggataccggggaggaaagcgccagcagcggcaagctaggcctgatcacaaacacaatcgccggggtcgcaggcctaatcaccggaggcagacgtacacgtcgggaggctattgttaatgcccagcctaaatgcaatccgaatcttcattattggaccacccaggatgaaggagctgccattggactggcttggatcccttactttggccccgccgctgagggaatttatatagaggggctgatgcacaaccaagatggactaatttgtggactccgccagctggccaatgaaaccacccaagctttacaactctttctgagagcaacaacagaacttcggacattttctatattgaatagaaaggctattgatttccttctccagagatggggtggtacctgccacatactcggtccagattgttgcatagaacctcatgactggaccaaaaatattactgacaaaatcgatcagatcattcacgatttcgtggataagacattacccgaccaaggcgacaacgacaactggtggactggatggaggcagtgataataggctggagcctcggtggccatgcttcttgccccttgggcctccccccagcccctcctccccttcctgcacccgtacccccgtggtctttgaataaagtctgagtgggcggc

SEQ ID NO: 21 - DNA, 2239 bp, Artificial Sequence
  Synthetic polynucleotide
tcaagcttttggaccctcgtacagaagctaatacgactcactatagggaaataagagagaaaagaagagtaagaagaaatataagagccaccatgggagtcaccggcattctgcagctccccagggatcgtttcaaaagaacttccttttttctgtgggtaatcatcctgttccaaaggacgttttccatccccctgggagttatacacaacagtacattgcaggtctctgacgtagacaaactcgtctgccgggacaaactttctagcactaatcagctgcggtcggtaggtctgaacttggaaggtaatggtgtcgccacagatgtgccatccgccaccaaacgctgggggttccggtcaggcgtgcccccaaaagtcgtcaactatgaagcaggcgaatgggcggaaaactgttataatctcgagatcaaaaaacctgacgggtccgagtgtttgcccgccgctcctgacggcatcagaggcttccctaggtgcagatatgtccacaaggtatcaggtaccggcccatgtgctggggacttcgctttccacaaggaaggagctttctttctctacgacaggctggcctctaccgtcatatataggggaactaccttcgccgaaggcgttgttgcctttttgatcctgcctcaggccaaaaaagacttcttttcttcccatcccctgcgggagccagttaacgctaccgaggacccgagctctggctattacagtaccaccatccggtatcaagctaccggattcggcacgaacgaaaccgagtacctattcgaggtggacaacctgacatatgttcaactggagtcccggttcaccccccagtttctgctgcagttgaacgagaccatctacacaagcggtaaaaggtctaataccactggaaaactgatctggaaagtaaacccggagatagataccaccattggagaatgggcattctgggagaccaagaaaaatttgaccaggaaaatacgctctgaagaactgtcctttacggtggtgtctaatggggcgaagaacatctccggacagagccctgcgcgcacatcctcagatccaggcacaaataccacaacagaggatcacaagattatggcatctgagaatagcagcgctatggtgcaggttcacagccaaggcagagaggccgcggtttcccatctcacaacattggctactatcagcacctctcctcaaagcctgacaacaaagcctggtccagataattctacccataatactccagtgtataaactcgacatttctgaggctacacaagtggagcagcaccatagaagaacagacaacgactcaactgcctccgacaccccttcagcgacaaccgccgccggccctcctaaggcggaaaacactaatacttcgaaatcaaccgattttctggatccagcgaccaccacctcgcctcagaatcattcggaaacggctggaaataataacacccaccaccaggacaccggcgaagaaagtgccagcagtggcaagctcgggctgatcaccaatactatcgcgggggtggccgggctaattacaggcggcagacggaccaggagagaggccattgtaaacgcccagcctaaatgcaaccccaacctgcattactggaccacccaagacgagggcgccgcaattggtttggcttggatcccctattttggacccgccgccgaagggatttatatcgaaggactgatgcacaaccaggatggccttatttgtgggcttcggcagctggccaatgagacgacacaagcgctgcagttattcttgagagccactaccgagcttaggaccttcagcattctgaatcgcaaggccatcgacttcctgttgcagcgatgggggggtacctgccatattctgggccctgattgctgtatagaaccccacgactggacgaagaatataaccgataaaatagatcagatcatccacgactttgtcgacaaaacactcccagatcagggcgataacgataattggtggaccggctggaggcagtggatcccagcaggaatcggggtgacaggcgttattatcgcggtcatagcactgttttgcatctgcaagttcgtcttttgataataggctggagcctcggtggccatgcttcttgccccttgggcctccccccagcccctcctccccttcctgcacccgtacccccgtggtctttgaataaagtctgagtgggcggc

SEQ ID NO: 22 - DNA, 2281 bp, Artificial Sequence
  Synthetic polynucleotide
tcaagcttttggaccctcgtacagaagctaatacgactcactatagggaaataagagagaaaagaagagtaagaagaaatataagagccaccatgggggtgacagggatattgcagctgcctcgggatcgcttcaagcgcacctccttttttctgtgggtcatcatcctctttcagcgcacatttagcattccgctcggcgtaattcataattcaactctacaagtctctgacgtggacaaattggtctgccgggacaagttgtcttcgacaaaccaattgaggtctgtagggctgaacctcgagggcaatggtgtggcgacggatgtaccctcggccaccaagcgttggggctttaggtctggcgtcccccctaaagtggtgaactatgaagctggggaatgggccgaaaattgctacaatctggaaattaagaaacctgacggaagcgagtgtctcccagctgccccagacggtatccgcgggttccccagatgcaggtacgttcataaagtgagtggaaccggcccatgcgccggagatttcgcattccacaaggaaggtgctttctttctttacgacaggctagcctccacagtgatctatcgcggcaccaccttcgcagagggcgtggttgcctttttgatcctgcctcaggccaaaaaagacttcttcagttctcaccctctgagggaaccagtgaacgccaccgaggacccttccagcggatactacagcaccacgatccgctatcaagcgaccggtttcgggaccaacgagactgagtacctctttgaagtggataacctgacatatgtgcagctggaatctcggtttaccccgcagttccttctccagctgaatgaaactatatacacctcaggcaagagatccaataccacaggtaaattgatttggaaagttaatcccgaaatcgacacaacgattggggagtgggccttttgggagaccaagaaaaatctgacacgcaagatcagaagtgaggagttgagtttcaccgtggtcagcaatggcgcgaaaaatatttccggtcaatctccagccaggactagctctgaccctggaacgaacactaccacagaagaccataagatcatggcaagtgagaattcttccgctatggttcaggtgcactcccagggccgggaagccgccgtctcacacctgacaaccctcgccacaatctccacttccccacagtccctgacaaccaaacccgggcctgacaactcaacacataatacgccagtttacaagctcgatatctctgaggctacccaggtggagcaacaccacaggcggactgacaacgacagcaccgctagtgataccccctcagccaccactgccgcaggtccccccaaggccgaaaatacaaataccagtaaaagtacggacttcctggaccccgcaactacaacctccccccaaaaccacagcgaaacggcagggaataataatacacaccatcaggataccggagaggagtccgcttcttccggcaagctgggactgataaccaacacaattgccggagtggcaggtctgattacgggagggcgcaggactagacgggaagcaatcgtgaacgcacagccaaagtgcaatcctaacctgcactactggactacccaagatgaaggggcagccattgggcttgcatggatcccctactttgggcctgcagcggaggggatttatatcgaaggcctgatgcataatcaggatggattgatttgcgggctcaggcagttggcgaatgaaacaacacaagccctacaattatttctgagggccactactgagttgcgaacatttagtatcctcaatagaaaggccatagacttcctgctccagcgctggggcgggacttgccacattctaggcccggactgttgtatcgaaccccatgactggaccaagaacataactgataagatagaccagatcatccatgatttcgttgataaaacactgcccgatcagggtgacaacgacaattggtggactggctggaggcagtggatcccagctggcattggggttacaggtgttataattgccgtgattgctctcttctgcatctgcaaatttgtcttcggtaaaccaatacccaatccactgctgggcctggatagcacgtgataataggctggagcctcggtggccatgcttcttgccccttgggcctccccccagcccctcctccccttcctgcacccgtacccccgtggtctttgaataaagtctgagtgggcggc

SEQ ID NO: 23 - DNA, 2161 bp, Artificial Sequence
  Synthetic polynucleotide
tcaagcttttggaccctcgtacagaagctaatacgactcactatagggaaataagagagaaaagaagagtaagaagaaatataagagccaccatgggagtgactggcattcttcagcttcctcgcgacaggtttaagagaacctcgttcttcctgtgggtcattatacttttccagcgcacattcagcatcccacttggagtgattcataattctacacttcaggttagcgacgtggacaagctggtctgccgggacaaactgtcgtcaacaaatcagcttaggtccgtaggcctgaaccttgaaggtaacggcgttgcaacagatgtgcctagcgcaacgaagcggtggggatttaggtctggtgttccaccaaaagtggtcaattacgaggccggagagtgggcagagaactgctataacctggaaataaaaaagcctgacggtagcgaatgcctgccagccgcgccagatggcattcgggggtttccccgctgtcgctacgtccacaaagtaagtggtactgggccttgtgccggtgacttcgcctttcacaaagagggcgcgttctttttgtatgaccgtctcgcctccacagtaatttaccgaggcactacatttgcagaaggggtggtggcattccttatattaccccaggctaaaaaggacttcttctctagccacccactccgggaaccagtgaatgcaaccgaggatccaagctcggggtactattctaccactatcaggtatcaggcaacagggtttggtacaaatgagactgaatatctcttcgaggttgacaacctgacctacgtgcagctggaaagtcgtttcactccgcagttcctcttgcagctcaatgagaccatatataccagtgggaaacggtctaacacaaccggaaaactgatttggaaagttaacccagaaattgatactacgattggtgagtgggcgttttgggagacaaagaagaatttaactaggaagatcaggtccgaagaactgtcattcactgtggtgtctaacggcgcgaaaaatatctctgggcagtctccagcccgcacatcctccgatcctggaacgaatacaaccaccgaagatcataagatcatggccagcgaaaactcctccgccatggtccaagtccattcccaagggagggaagctgcagtctcccacctcactactttggcaaccattagcacttcgccacaaagcctgaccaccaagcccggcccggataattcaacccacaacaccccagtttataaactggatatcagtgaggcgactcaggtggagcagcatcaccgaagaactgataatgattctactgccagcgacaccccaagcgcgaccaccgctgccggacctcccaaggccgagaatactaacacttcgaaatcaacagactttctggatcccgccacaaccacgtccccacagaatcactctgaaaccgccggtaacaataatacacatcaccaggataccggggaggaatccgcttctagcgggaagctgggccttataacaaatacgatagcaggggtggccggactcatcacagggggtcggaggacacggcgggaggctatagtcaatgctcagcctaaatgcaacccgaatctgcactattggaccacacaggacgagggagccgccatcgggctggcatggattccatatttcggcccagccgctgagggcatctacatcgagggtcttatgcacaaccaggacgggctaatctgcggacttaggcagctggccaacgagacaacacaggcactccagctcttccttcgcgctacaacagagctacggaccttttccattctcaacaggaaggccatagacttcctcttgcagcggtggggaggcacctgtcatattctcgggcccgattgttgtatcgaacctcatgattggaccaaaaatattacagataagattgatcaaatcatccacgatttcgtagataagacactccccgaccagggagacaatgacaactggtggacggggtggcgacagtgataataggctggagcctcggtggccatgcttcttgccccttgggcctccccccagcccctcctccccttcctgcacccgtacccccgtggtctttgaataaagtctgagtgggcggc

SEQ ID NO: 24 - DNA, 2203 bp, Artificial Sequence
  Synthetic polynucleotide
tcaagcttttggaccctcgtacagaagctaatacgactcactatagggaaataagagagaaaagaagagtaagaagaaatataagagccaccatgggcgtgactgggatcctccaactgcctcgcgatagattcaagcgaactagtttctttctatgggtcatcatactcttccagcgaaccttctcaattccactgggagtcattcacaactccaccttgcaagtgtcagatgtggacaagttggtatgccgagacaaactctcttctactaatcagctcaggtctgtggggctgaaccttgaaggtaacggcgtggccacagatgtgccttcggctactaagcgatggggtttccggtccggtgtgcccccgaaggtggtaaattatgaggctggcgagtgggccgaaaactgctataacttggagattaaaaagcctgacggtagcgaatgtttaccagccgctcccgatggaattaggggctttcccagatgtcggtatgtccacaaagtgtctggaactgggccttgtgctggggattttgccttccataaagaaggggccttctttctatacgatcggctggccagtaccgtcatttatcgaggcactactttcgccgaaggcgttgtggcgtttttgattctcccacaggccaagaaagacttcttttcctcacatcctctacgggagccagtaaatgcaaccgaagatccttctagtggctactactccaccactattcggtaccaggctaccggattcggcaccaatgagacagaatatttatttgaggtggacaaccttacttatgtgcagttggaaagcaggttcaccccccagttcctcctgcagttgaacgagacaatttatacatcaggtaagcggtctaacactaccggtaagttaatctggaaagtgaaccccgagatcgacacgaccatcggggaatgggctttttgggagaccaagaaaaacctgacgcgcaagattagatccgaggagctcagtttcactgtggtgagtaatggcgctaaaaatatcagtgggcagagccccgcccggacaagcagcgaccctgggacaaacactacaaccgaagaccacaaaataatggcctcagaaaacagtagcgcgatggtgcaagtgcatagccaaggacgcgaagccgctgtatcccatcttaccaccctggctacgattagcacctcgccccagtctctgactacgaagccagggcctgacaattctacacacaacacacccgtgtacaaacttgacatctcagaagcaacgcaggtggaacagcatcaccgccggacggataacgacagcaccgcaagcgatacccccagtgctactactgcagccggtcccccaaaagcagaaaatacgaataccagcaagagtacagacttcttggacccggccaccacaacaagcccacaaaatcacagcgagactgcaggcaacaataacacacatcaccaggatacgggggaggaatctgcttcgtccggcaaactcggactgatcacaaatacgatcgccggggtggccggcttgatcaccggcggcaggcggactcggagagaagccatagtgaacgctcagcctaagtgcaatccgaatctacactattggactactcaggacgaaggcgcagctattggcttggcttggattccatactttgggccagcagcagagggaatatacatcgagggactgatgcataaccaggatggcctgatctgtggcctccgacagttggctaatgaaactacccaggccctccaattgttcctgcgcgctacaactgaacttcggaccttttctattttgaacaggaaggccatagatttcctgcttcagcgttggggcggaacatgccatatcctgggccccgactgttgtatcgagcctcatgattggacgaagaatataactgataaaatagatcaaataatccacgacttcgtcgacaagaccctgcctgaccagggggacaatgataactggtggactggatggcgacagggtaagccaatcccgaaccctcttctcggtctggatagcacgtgataataggctggagcctcggtggccatgcttcttgccccttgggcctccccccagcccctcctccccttcctgcacccgtacccccgtggtctttgaataaagtctgagtgggcggc

SEQ ID NO: 25 - DNA, 2217 bp, Artificial Sequence
  Synthetic polynucleotide
atggacagtaggccccagaagatctggatggcaccatctctcactgagagtgatatggactatcataagatcctgacggcagggctgagcgtgcagcaaggcatcgtcaggcagcgggtgatcccagtatatcaggtcaacaaccttgaggagatttgtcaactgataattcaggcctttgaagccggcgtcgactttcaagaaagtgcagatagctttctcctgatgctgtgtttgcaccatgcgtaccagggcgactataagctgttcctggagtctggggctgttaagtacctggaggggcacggtttcaggtttgaggtgaagaagcgggacggcgtcaagaggttagaggaactgctgccagcagtgagctctggtaagaatattaaaaggaccctcgctgcaatgccggaggaggaaaccacagaggcaaacgctggccagttcctgagcttcgcatctctttttctaccgaagctagtggtaggagaaaaagcttgcctcgaaaaggtacagagacagatccaggttcacgctgaacaggggcttatccagtacccaaccgcttggcagtcggtgggtcacatgatggtgattttcagactgatgcggacaaattttctgattaagttcctgcttattcaccaggggatgcatatggtggcaggccacgatgcaaatgacgccgtaatctctaatagcgttgctcaagcgcgcttctctgggctgctgatcgtgaaaacagtgctggatcatatcttacaaaagactgagaggggtgtgaggctgcaccccctggctagaaccgcaaaggtcaagaatgaagtgaattcgtttaaggctgccctctcttcactcgccaaacacggggagtacgcgcctttcgcaagactgctgaacctttcaggggtgaacaatcttgagcatggattgtttccacagttgtccgccattgcactgggcgtggcaacagcacacgggtccactctggccggtgtgaacgttggggagcagtatcaacagctcagggaagctgccactgaggccgagaaacagctccagcagtacgccgagtcccgcgaattggatcacctcggcctcgacgaccaggaaaagaagattctgatgaattttcatcaaaaaaaaaacgagatttcatttcaacagaccaacgcaatggtgactcttagaaaagagcgcctagccaaattaacggaggccataaccgcagccagcctaccaaagacatctgggcactacgacgacgacgacgacatcccgtttcccggtccaattaatgacgacgacaatcccggccaccaagacgacgacccaactgactcgcaggacaccacgattcccgatgtcgtggtggaccccgatgacgggagctacggagaatatcaaagctactctgagaacggcatgaatgcacccgacgatctggtgctgtttgacttggacgaggacgatgaagatactaagcccgtgcccaataggtcaactaaaggcggccagcagaaaaattcccaaaaggggcagcacatcgagggcagacaaacacaatccagacctatacagaatgtgcctggaccccaccgcactattcaccacgcaagtgctcctctgaccgacaatgatcgcaggaatgagccatctggttccacatctccgagaatgcttacacctatcaacgaagaggccgacccgctcgacgatgcggacgacgagacctctagtttgcctcctcttgagtcagatgacgaagaacaggaccgggatggaacatcgaatagaactcctacagtggctccgcccgctccagtataccgcgatcacagtgagaagaaggagctgccacaggatgaacaacaggaccaggatcacacccaagaagcacgtaaccaggactcggataacactcagtcagaacactcttttgaggagatgtatcggcacattcttcgatcgcaaggtccatttgacgcagtcctctactaccacatgatgaaggatgaacccgtcgttttttccacaagcgatgggaaagagtatacatacccggattccttggaggaggagtacccgccctggctgacagagaaagaggcgatgaacgaggagaaccgctttgtaactctggacggtcagcaattttattggcccgttatgaatcacaagaacaagttcatggctatcttgcaacatcaccag

SEQ ID NO: 26 - protein, 739 aa, Artificial Sequence
  Synthetic polypeptide
MDSRPQKIWMAPSLTESDMDYHKILTAGLSVQQGIVRQRVIPVYQVNNLEEICQLIIQAFEAGVDFQESADSFLLMLCLHHAYQGDYKLFLESGAVKYLEGHGFRFEVKKRDGVKRLEELLPAVSSGKNIKRTLAAMPEEETTEANAGQFLSFASLFLPKLVVGEKACLEKVQRQIQVHAEQGLIQYPTAWQSVGHMMVIFRLMRTNFLIKFLLIHQGMHMVAGHDANDAVISNSVAQARFSGLLIVKTVLDHILQKTERGVRLHPLARTAKVKNEVNSFKAALSSLAKHGEYAPFARLLNLSGVNNLEHGLFPQLSAIALGVATAHGSTLAGVNVGEQYQQLREAATEAEKQLQQYAESRELDHLGLDDQEKKILMNFHQKKNEISFQQTNAMVTLRKERLAKLTEAITAASLPKTSGHYDDDDDIPFPGPINDDDNPGHQDDDPTDSQDTTIPDVVVDPDDGSYGEYQSYSENGMNAPDDLVLFDLDEDDEDTKPVPNRSTKGGQQKNSQKGQHIEGRQTQSRPIQNVPGPHRTIHHASAPLTDNDRRNEPSGSTSPRMLTPINEEADPLDDADDETSSLPPLESDDEEQDRDGTSNRTPTVAPPAPVYRDHSEKKELPQDEQQDQDHTQEARNQDSDNTQSEHSFEEMYRHILRSQGPFDAVLYYHMMKDEPVVFSTSDGKEYTYPDSLEEEYPPWLTEKEAMNEENRFVTLDGQQFYWPVMNHKNKFMAILQHHQ

SEQ ID NO: 27 - DNA, 2428 bp, Artificial Sequence
  Synthetic polynucleotide
tcaagcttttggaccctcgtacagaagctaatacgactcactatagggaaataagagagaaaagaagagtaagaagaaatataagagccaccatggacagtaggccccagaagatctggatggcaccatctctcactgagagtgatatggactatcataagatcctgacggcagggctgagcgtgcagcaaggcatcgtcaggcagcgggtgatcccagtatatcaggtcaacaaccttgaggagatttgtcaactgataattcaggcctttgaagccggcgtcgactttcaagaaagtgcagatagctttctcctgatgctgtgtttgcaccatgcgtaccagggcgactataagctgttcctggagtctggggctgttaagtacctggaggggcacggtttcaggtttgaggtgaagaagcgggacggcgtcaagaggttagaggaactgctgccagcagtgagctctggtaagaatattaaaaggaccctcgctgcaatgccggaggaggaaaccacagaggcaaacgctggccagttcctgagcttcgcatctctttttctaccgaagctagtggtaggagaaaaagcttgcctcgaaaaggtacagagacagatccaggttcacgctgaacaggggcttatccagtacccaaccgcttggcagtcggtgggtcacatgatggtgattttcagactgatgcggacaaattttctgattaagttcctgcttattcaccaggggatgcatatggtggcaggccacgatgcaaatgacgccgtaatctctaatagcgttgctcaagcgcgcttctctgggctgctgatcgtgaaaacagtgctggatcatatcttacaaaagactgagaggggtgtgaggctgcaccccctggctagaaccgcaaaggtcaagaatgaagtgaattcgtttaaggctgccctctcttcactcgccaaacacggggagtacgcgcctttcgcaagactgctgaacctttcaggggtgaacaatcttgagcatggattgtttccacagttgtccgccattgcactgggcgtggcaacagcacacgggtccactctggccggtgtgaacgttggggagcagtatcaacagctcagggaagctgccactgaggccgagaaacagctccagcagtacgccgagtcccgcgaattggatcacctcggcctcgacgaccaggaaaagaagattctgatgaattttcatcaaaaaaaaaacgagatttcatttcaacagaccaacgcaatggtgactcttagaaaagagcgcctagccaaattaacggaggccataaccgcagccagcctaccaaagacatctgggcactacgacgacgacgacgacatcccgtttcccggtccaattaatgacgacgacaatcccggccaccaagacgacgacccaactgactcgcaggacaccacgattcccgatgtcgtggtggaccccgatgacgggagctacggagaatatcaaagctactctgagaacggcatgaatgcacccgacgatctggtgctgtttgacttggacgaggacgatgaagatactaagcccgtgcccaataggtcaactaaaggcggccagcagaaaaattcccaaaaggggcagcacatcgagggcagacaaacacaatccagacctatacagaatgtgcctggaccccaccgcactattcaccacgcaagtgctcctctgaccgacaatgatcgcaggaatgagccatctggttccacatctccgagaatgcttacacctatcaacgaagaggccgacccgctcgacgatgcggacgacgagacctctagtttgcctcctcttgagtcagatgacgaagaacaggaccgggatggaacatcgaatagaactcctacagtggctccgcccgctccagtataccgcgatcacagtgagaagaaggagctgccacaggatgaacaacaggaccaggatcacacccaagaagcacgtaaccaggactcggataacactcagtcagaacactcttttgaggagatgtatcggcacattcttcgatcgcaaggtccatttgacgcagtcctctactaccacatgatgaaggatgaacccgtcgttttttccacaagcgatgggaaagagtatacatacccggattccttggaggaggagtacccgccctggctgacagagaaagaggcgatgaacgaggagaaccgctttgtaactctggacggtcagcaattttattggcccgttatgaatcacaagaacaagttcatggctatcttgcaacatcaccagtgataataggctggagcctcggtggccatgcttcttgccccttgggcctccccccagcccctcctccccttcctgcacccgtacccccgtggtctttgaataaagtctgagtgggcggc

SEQ ID NO: 28 - RNA, 1992 nt, Artificial Sequence
  Synthetic polynucleotide
auggagacuccagcccagcugcuguucuuacucuuacucuggcugccugauaccacgggaauaccguuaggcguuauucauaauucgacacuccaggugucagacguggauaagcuggucugccgcgauaagcugaguaguacgaaccagcugagauccgucggucuaaaccuugagggaaaugguguggccacugacguccccagcgcgaccaagcgguggggguucaggucuggugucccaccuaaaguagugaacuacgaagcaggugagugggcagaaaacugcuacaacuuagaaaucaaaaagccagauggaucugaaugccugcccgccgcgccagaugggauccgcggcuucccaaggugccgcuacguacacaaggugagcggaaccgggccuugugccggggauuucgcuuuucauaaagagggggcguucuuuuuguaugauagauuggcgagcaccguuaucuaccgcgguaccaccuucgccgaaggcgugguggccuuucuuauccugccucaggccaaaaaggacuucuucuccagucacccguugcgcgaacccgucaaugcuaccgaggacccaucuucaggauacuauuccaccacuauacgcuaucaggccacaggcuucgggaccaaugaaacugaguaccucuuugaggucgacaaccuuacauauguccaacucgaaucacgcuucacuccucaauuucugcuucaguugaacgagacaauauauacaucaggcaagcgaucuaauacuaccggcaagcugauauggaaggugaauccagagaucgauaccacaaucggcgagugggccuuuugggagacuaagaaaaacuugacucgcaaaauccggagugaggagcugaguuucacuguggugucuaauggugcgaagaauauaagcggccaauccccugcuaggaccucuucggaucccgguacgaacacaacaacugaggaccacaagauuauggccagcgaaaauucuagcgcaaugguacaggugcauucacagggccgggaggcggcagucucucaccuaacgacacuggcgaccauaucgaccucuccacagucacugacaacuaagccuggacccgauaauuccacacacaacacccccgucuacaaguuagauauaucugaggcaacucaaguagaacaacaucaccggcgcacagacaaugacuccaccgccucugacaccccuagcgccacuacggcagcagggccaccuaaggcagagaacaccaacacaucgaaaucaaccgacuuucuggacccggcaacuaccacaucuccccagaaucauucagaaacagccggaaacaauaauacacaucaccaagauacaggcgaggagagugccagcuccggaaaguugggucucauaaccaacacaauugcuggcguugccggccuuaucacagguggcagacggacaaggagagaagcuauugugaacgcccagccuaagugcaacccaaaucuccacuacuggacgacacaggaugaaggggcagcgaucgggcuggccuggauaccuuacuuuggacccgcagcagagggcaucuauaucgagggcuugaugcacaaccaagacgggcugaucugcggccugcgccagcuggccaacgaaacuacacaggcccugcagcuguuucugcgggcuacaacugagcuccggacuuuuaguauucugaaucgaaaggccauagauuuccuucugcagagaugggguggcacaugucacauccuuggccccgauugcugcaucgaaccccacgauuggacaaaaaacauuaccgauaagauagaccagaucauacacgauuucguugacaagacauugcccgaccaaggagauaaugacaauugguggacaggauggaggcaguggauaccagcuggcauaggcgugaccggggucaucaucgcagugauugccuuguuuugcauuugcaaguucguguuc

SEQ ID NO: 29 - RNA, 2034 nt, Artificial Sequence
  Synthetic polynucleotide
auggagacccccgcucagcuccuguuucugcuccugcuaugguuaccagauacaacugguauuccgcucgguguuauacacaauuccacacuccaggucucagauguagauaaauuaguuugucgggauaaacugucuaguaccaaucagcuuaggucugucggucuuaaucucgaaggaaacggcguugccaccgaugugccuagcgcuacgaagagauggggcuuucgaagcggagugcccccaaagguggucaacuaugaagcuggagaaugggccgagaacugcuauaaccucgaaauaaaaaagccugacggcucugagugucugccagccgccccagauggaauuagaggguuuccacgaugcagguacguacauaaagucagcggcaccgguccaugcgcgggcgacuuugcauuucacaaagagggagccuucuuccuauacgacagguuagccagcacagugauauacagggggacuacguucgcugagggcgucguugcauuuuugauucuaccacaagcaaaaaaagacuuuuucaguucucauccucugcgagaacccguaaaugcuacugaggaccccuccucaggcuacuauucuaccacaauucguuaucaggcgacaggcuuugguacuaaugaaaccgaguaucuuuucgaaguagacaaucugacguacgugcagcucgaaucacguuucaccccacaauuccuccugcaacucaacgagacaaucuauacauccgguaaacgcaguaacacuacugggaaacucaucuggaaggugaauccugagauagacacuacuaucggcgagugggcauuuugggaaaccaaaaaaaaucugacucguaagauuagaucagaagaguuauccuuuacugucgucaguaauggagccaaaaacaucagugggcaguccccggcucggacgagcuccgaccccggcaccaauacaacuacugaagaucauaagaucauggcauccgaaaauaguuccgccaugguacaggugcacagccagggcagagaagccgcugucucacaccuuacuacgcuggcuacuauaagcaccucgccucaaucccugaccacaaagccuggucccgacaacuccacccauaacaccccuguuuacaagcuggacauuagcgaagcaacucaggucgaacagcaucacaggcguacagauaacgauagcaccgcaagugauaccccaucugccacgaccgccgccggacccccuaaggcagagaacaccaacacaucgaagucaacagauuuucuugacccagccacuaccacaucaccccagaaucacucugaaacugcuggcaacaauaauacucaucaccaggauacuggcgaagagagcgccagcucuggcaaacugggauugauuacaaacacgauugcaggaguugccggucucaucaccggagguagaagaacccgccgggaggcuauugugaacgcccagccaaaguguaacccuaaccuucauuacuggaccacucaggaugaaggagcugcaauuggccucgccuggauucccuacuucggaccagccgccgaggguauuuacaucgagggccucaugcauaaccaggauggccugaucugcggccuaaggcaguuggccaacgaaacgacgcaagcgcuccaguuauuucuucgagcaacuacagaacuacgcacuuuuucaauccugaaccgaaaagccaucgacuuucuccugcagagauggggcggcacuugucacauucuggggccugauuguuguaucgagccacaugacuggaccaaaaauaucacggacaagaucgaucagaucauucaugacuuuguggauaaaacacugccagaccaaggggauaacgauaacugguggacuggcuggcggcaguggauccccgcagguauuggggucacuggaguaauuaucgccgugauugcucuguuuugcauuugcaaguucguuuucgguaaacccauuccaaauccccuacuaggccuggacagcaca

SEQ ID NO: 30 - RNA, 1914 nt, Artificial Sequence
  Synthetic polynucleotide
auggaaacaccagcccagcugcuguuucuccugcuguugugguugccagacacuacaggaaucccccuuggugugauucauaacuccacgcuucaagugucggauguagacaaacuugugugucgggauaagcuuucgucuacaaaccaauuaagaucggugggacugaaccuggaaggaaauggaguggccacugacguccccuccgcgaccaaacgguggggauuucggucaggcgugccccccaaagucgucaauuacgaggccggagagugggcagaaaacuguuauaaccucgaaaucaagaagcccgauggaucggaaugcuugccggcagccccugacgggauccgcggguucccgaggugcagauacgugcacaaagucuccggcaccggaccuugcgccggcgacuucgcguuucacaaagaaggcgcauuuuuucuguacgaucgacuugcaagcacuguuauauauagagggacgacauucgcugaaggcguuguggcauuucugauacugccccaagcuaaaaaggauuuuuuuagcucacauccacuacgggaaccggucaaugcuacugaagauccaucaagcggcuauuauucaaccaccauaagguaucaggcgacagguuuuggcacuaaugaaaccgaguaccucuuugaaguagacaaucucacuuacgugcaacuugagucccgauuuaccccucaguuucugcugcaauuaaacgagacuauuuacacuuccggcaaaaggaguaacacgacaggcaaacugaucuggaaggucaacccugagaucgauaccacgauuggcgagugggcauucugggagacuaaaaaaaaccugaccaggaagauacgguccgaagagcugucuuucacagucguuagcaacggugccaagaacauuuccggccaguccccugcccggaccucgagugaucccggaaccaauacgacaaccgaggaucauaagaucauggccagcgaaaauagcagcgcaaugguacaaguucauucccaagggcgagaagccgcggugucccaccugacuacucuggccacuauuuccacaagcccucagucguuaacaaccaaaccugggccugacaauucaacccauaacacaccuguauauaagcuggauauuucagaggcaacccaaguggaacagcaccauaggagaacggacaaugacucuacagccuccgacacccccucugcaacgaccgcugccggaccacccaaggcugaaaacaccaacacauccaagaguaccgauuuuuuggacccggcgaccacuacgaguccucagaaucacagugaaacggcagggaauaacaacacccaccaucaggauacgggcgaagagucugccaguucuggcaaguuggggcucaucacgaacaccauugccgggguggcuggucuuaucacuggaggucgcaggacgagacgugaggcuauagugaacgcacagccaaaguguaaucccaaccuucauuacuggaccacacaggacgagggagcugcaauuggguuggccuggaucccuuacuuuggacccgcagccgaaggcaucuacaucgaaggccuaaugcacaaucaggacggccuuaucugcggauugcgacagcuugccaaugaaacaacccaggcucuucaacuguuucuaagagccacaacugaguugaggacuuuuagcaucuugaauaggaaagccauagacuucuuguuacagaggugggggggcacaugucacauccucggacccgacuguuguauagagccucaugacuggaccaagaacaucacagauaagauugaccagauuauccaugauuuugucgauaaaacacuucccgaccaaggggauaaugauaacugguggaccggcuggcgccag

SEQ ID NO: 31 - RNA, 2271 nt, Artificial Sequence
  Synthetic polynucleotide
auggaaacgccagcacaauuacuuuuucugcuuuugcuguggcucccugacacaacuggacaucaccaccaucaucauggcaaaccuauaccuaacccucugcugggucuggacucuaccggugauuggaaaugggauggaggccuggucccucggggcucugaugagauguugcgagagcugcaggagacuaacgcagcacuccaggacguccgcgaacuucuccgacagcagguuagacagaucaccuuccuuagauguuuacuuaugggggggagacugcucugcagauuggaagagcuggagaggcgucuggaagagcuggagcggcgccuugaggaacuggaacgggccauuaauacaguugaugaguuggccgccuugaggagacgucuggaggaacuagcacgcggcucuauaccucuagggguuauccauaauuccacgcuccagguuagugacguugacaagcuggugugccgcgauaaauuaucuuccacgaaccaguugagauccguuggacuaaaucuugagggaaacggcguugccacagacgugccaucugccaccaaaaggugggguuuccgcuccggugugccccccaaaguggugaauuacgaggcaggggaaugggcggaaaacuguuacaaucuggaaauuaagaagccugacggcagugagugucugccggccgcuccugacggaauaagaggguucccaagguguagauacgugcacaaggucucuggaaccggaccuugcgccggggacuucgccuuccacaaagaaggugcauuuuuccuauaugaccgcuuagccucgacagugauuuacaggggcaccacuuucgcagaggggguagucgcuuucuuaauuuugccucaggcgaaaaaggacuuuuuuucuagucacccccucagggagccuguaaacgcaaccgaggacccaaguagcgguuacuacuccacaacgaucagguaccaggccaccggauuuggcacaaacgaaacggaauaccuauuugaagucgacaaccugaccuacguccagcuggagucccgauucacgccccaguuccuacugcagcugaaugagacaauuuacacuucugguaaaagaaguaacaccacuggaaaacucaucuggaaggucaauccagaaauugauacaacaaucggugagugggcuuuuugggagacgaaaaaaaacuugaccagaaaaaucagguccgaggagcugaguuucacgguaguuagcaacggagcgaaaaauaucucaggacagaguccagcccgaaccucuucggauccaggcacuaauacgacaacagaagaccauaagauuauggcuagugagaacucaucugcuaugguccaggugcacucgcaaggacgcgaagcagcugugucacaucugaccacccuugcaacuaucagcacaaguccucagagcuuaaccaccaagccuggucccgacaauucuacacacaauacuccuguuuacaaauuagacaucagugaagccacccagguugaacaacaccaccggcggacggacaaugacucaacggcaucugacaccccauccgccacaacggcugccgggccaccaaaagcugagaauaccaacacaucaaagucaaccgacuucuuagaccccgcuacaaccaccuccccccaaaaucauuccgaaacugccgguaacaacaacacccaccaccaggauaccggggaggaaagcgccagcagcggcaagcuaggccugaucacaaacacaaucgccggggucgcaggccuaaucaccggaggcagacguacacgucgggaggcuauuguuaaugcccagccuaaaugcaauccgaaucuucauuauuggaccacccaggaugaaggagcugccauuggacuggcuuggaucccuuacuuuggccccgccgcugagggaauuuauauagaggggcugaugcacaaccaagauggacuaauuuguggacuccgccagcuggccaaugaaaccacccaagcuuuacaacucuuucugagagcaacaacagaacuucggacauuuucuauauugaauagaaaggcuauugauuuccuucuccagagauggggugguaccugccacauacucgguccagauuguugcauagaaccucaugacuggaccaaaaauauuacugacaaaaucgaucagaucauucacgauuucguggauaagacauuacccgaccaaggcgacaacgacaacugguggacuggauggaggcag

SEQ ID NO: 32 - RNA, 2028 nt, Artificial Sequence
  Synthetic polynucleotide
augggagucaccggcauucugcagcuccccagggaucguuucaaaagaacuuccuuuuuucuguggguaaucauccuguuccaaaggacguuuuccaucccccugggaguuauacacaacaguacauugcaggucucugacguagacaaacucgucugccgggacaaacuuucuagcacuaaucagcugcggucgguaggucugaacuuggaagguaauggugucgccacagaugugccauccgccaccaaacgcuggggguuccggucaggcgugcccccaaaagucgucaacuaugaagcaggcgaaugggcggaaaacuguuauaaucucgagaucaaaaaaccugacggguccgaguguuugcccgccgcuccugacggcaucagaggcuucccuaggugcagauauguccacaagguaucagguaccggcccaugugcuggggacuucgcuuuccacaaggaaggagcuuucuuucucuacgacaggcuggccucuaccgucauauauaggggaacuaccuucgccgaaggcguuguugccuuuuugauccugccucaggccaaaaaagacuucuuuucuucccauccccugcgggagccaguuaacgcuaccgaggacccgagcucuggcuauuacaguaccaccauccgguaucaagcuaccggauucggcacgaacgaaaccgaguaccuauucgagguggacaaccugacauauguucaacuggagucccgguucaccccccaguuucugcugcaguugaacgagaccaucuacacaagcgguaaaaggucuaauaccacuggaaaacugaucuggaaaguaaacccggagauagauaccaccauuggagaaugggcauucugggagaccaagaaaaauuugaccaggaaaauacgcucugaagaacuguccuuuacgguggugucuaauggggcgaagaacaucuccggacagagcccugcgcgcacauccucagauccaggcacaaauaccacaacagaggaucacaagauuauggcaucugagaauagcagcgcuauggugcagguucacagccaaggcagagaggccgcgguuucccaucucacaacauuggcuacuaucagcaccucuccucaaagccugacaacaaagccugguccagauaauucuacccauaauacuccaguguauaaacucgacauuucugaggcuacacaaguggagcagcaccauagaagaacagacaacgacucaacugccuccgacaccccuucagcgacaaccgccgccggcccuccuaaggcggaaaacacuaauacuucgaaaucaaccgauuuucuggauccagcgaccaccaccucgccucagaaucauucggaaacggcuggaaauaauaacacccaccaccaggacaccggcgaagaaagugccagcaguggcaagcucgggcugaucaccaauacuaucgcggggguggccgggcuaauuacaggcggcagacggaccaggagagaggccauuguaaacgcccagccuaaaugcaaccccaaccugcauuacuggaccacccaagacgagggcgccgcaauugguuuggcuuggauccccuauuuuggacccgccgccgaagggauuuauaucgaaggacugaugcacaaccaggauggccuuauuugugggcuucggcagcuggccaaugagacgacacaagcgcugcaguuauucuugagagccacuaccgagcuuaggaccuucagcauucugaaucgcaaggccaucgacuuccuguugcagcgauggggggguaccugccauauucugggcccugauugcuguauagaaccccacgacuggacgaagaauauaaccgauaaaauagaucagaucauccacgacuuugucgacaaaacacucccagaucagggcgauaacgauaauugguggaccggcuggaggcaguggaucccagcaggaaucggggugacaggcguuauuaucgcggucauagcacuguuuugcaucugcaaguucgucuuu

SEQ ID NO: 33 - RNA, 2070 nt, Artificial Sequence
  Synthetic polynucleotide
augggggugacagggauauugcagcugccucgggaucgcuucaagcgcaccuccuuuuuucugugggucaucauccucuuucagcgcacauuuagcauuccgcucggcguaauucauaauucaacucuacaagucucugacguggacaaauuggucugccgggacaaguugucuucgacaaaccaauugaggucuguagggcugaaccucgagggcaaugguguggcgacggauguacccucggccaccaagcguuggggcuuuaggucuggcguccccccuaaaguggugaacuaugaagcuggggaaugggccgaaaauugcuacaaucuggaaauuaagaaaccugacggaagcgagugucucccagcugccccagacgguauccgcggguuccccagaugcagguacguucauaaagugaguggaaccggcccaugcgccggagauuucgcauuccacaaggaaggugcuuucuuucuuuacgacaggcuagccuccacagugaucuaucgcggcaccaccuucgcagagggcgugguugccuuuuugauccugccucaggccaaaaaagacuucuucaguucucacccucugagggaaccagugaacgccaccgaggacccuuccagcggauacuacagcaccacgauccgcuaucaagcgaccgguuucgggaccaacgagacugaguaccucuuugaaguggauaaccugacauaugugcagcuggaaucucgguuuaccccgcaguuccuucuccagcugaaugaaacuauauacaccucaggcaagagauccaauaccacagguaaauugauuuggaaaguuaaucccgaaaucgacacaacgauuggggagugggccuuuugggagaccaagaaaaaucugacacgcaagaucagaagugaggaguugaguuucaccguggucagcaauggcgcgaaaaauauuuccggucaaucuccagccaggacuagcucugacccuggaacgaacacuaccacagaagaccauaagaucauggcaagugagaauucuuccgcuaugguucaggugcacucccagggccgggaagccgccgucucacaccugacaacccucgccacaaucuccacuuccccacagucccugacaaccaaacccgggccugacaacucaacacauaauacgccaguuuacaagcucgauaucucugaggcuacccagguggagcaacaccacaggcggacugacaacgacagcaccgcuagugauacccccucagccaccacugccgcagguccccccaaggccgaaaauacaaauaccaguaaaaguacggacuuccuggaccccgcaacuacaaccuccccccaaaaccacagcgaaacggcagggaauaauaauacacaccaucaggauaccggagaggaguccgcuucuuccggcaagcugggacugauaaccaacacaauugccggaguggcaggucugauuacgggagggcgcaggacuagacgggaagcaaucgugaacgcacagccaaagugcaauccuaaccugcacuacuggacuacccaagaugaaggggcagccauugggcuugcauggauccccuacuuugggccugcagcggaggggauuuauaucgaaggccugaugcauaaucaggauggauugauuugcgggcucaggcaguuggcgaaugaaacaacacaagcccuacaauuauuucugagggccacuacugaguugcgaacauuuaguauccucaauagaaaggccauagacuuccugcuccagcgcuggggcgggacuugccacauucuaggcccggacuguuguaucgaaccccaugacuggaccaagaacauaacugauaagauagaccagaucauccaugauuucguugauaaaacacugcccgaucagggugacaacgacaauugguggacuggcuggaggcaguggaucccagcuggcauugggguuacagguguuauaauugccgugauugcucucuucugcaucugcaaauuugucuucgguaaaccaauacccaauccacugcugggccuggauagcacg

SEQ ID NO: 34 - RNA, 1950 nt, Artificial Sequence
  Synthetic polynucleotide
augggagugacuggcauucuucagcuuccucgcgacagguuuaagagaaccucguucuuccugugggucauuauacuuuuccagcgcacauucagcaucccacuuggagugauucauaauucuacacuucagguuagcgacguggacaagcuggucugccgggacaaacugucgucaacaaaucagcuuagguccguaggccugaaccuugaagguaacggcguugcaacagaugugccuagcgcaacgaagcgguggggauuuaggucugguguuccaccaaaaguggucaauuacgaggccggagagugggcagagaacugcuauaaccuggaaauaaaaaagccugacgguagcgaaugccugccagccgcgccagauggcauucggggguuuccccgcugucgcuacguccacaaaguaagugguacugggccuugugccggugacuucgccuuucacaaagagggcgcguucuuuuuguaugaccgucucgccuccacaguaauuuaccgaggcacuacauuugcagaaggggugguggcauuccuuauauuaccccaggcuaaaaaggacuucuucucuagccacccacuccgggaaccagugaaugcaaccgaggauccaagcucgggguacuauucuaccacuaucagguaucaggcaacaggguuugguacaaaugagacugaauaucucuucgagguugacaaccugaccuacgugcagcuggaaagucguuucacuccgcaguuccucuugcagcucaaugagaccauauauaccagugggaaacggucuaacacaaccggaaaacugauuuggaaaguuaacccagaaauugauacuacgauuggugagugggcguuuugggagacaaagaagaauuuaacuaggaagaucagguccgaagaacugucauucacuguggugucuaacggcgcgaaaaauaucucugggcagucuccagcccgcacauccuccgauccuggaacgaauacaaccaccgaagaucauaagaucauggccagcgaaaacuccuccgccaugguccaaguccauucccaagggagggaagcugcagucucccaccucacuacuuuggcaaccauuagcacuucgccacaaagccugaccaccaagcccggcccggauaauucaacccacaacaccccaguuuauaaacuggauaucagugaggcgacucagguggagcagcaucaccgaagaacugauaaugauucuacugccagcgacaccccaagcgcgaccaccgcugccggaccucccaaggccgagaauacuaacacuucgaaaucaacagacuuucuggaucccgccacaaccacguccccacagaaucacucugaaaccgccgguaacaauaauacacaucaccaggauaccggggaggaauccgcuucuagcgggaagcugggccuuauaacaaauacgauagcagggguggccggacucaucacagggggucggaggacacggcgggaggcuauagucaaugcucagccuaaaugcaacccgaaucugcacuauuggaccacacaggacgagggagccgccaucgggcuggcauggauuccauauuucggcccagccgcugagggcaucuacaucgagggucuuaugcacaaccaggacgggcuaaucugcggacuuaggcagcuggccaacgagacaacacaggcacuccagcucuuccuucgcgcuacaacagagcuacggaccuuuuccauucucaacaggaaggccauagacuuccucuugcagcgguggggaggcaccugucauauucucgggcccgauuguuguaucgaaccucaugauuggaccaaaaauauuacagauaagauugaucaaaucauccacgauuucguagauaagacacuccccgaccagggagacaaugacaacugguggacgggguggcgacag

SEQ ID NO: 35 - RNA, 1992 nt, Artificial Sequence
  Synthetic polynucleotide
augggcgugacugggauccuccaacugccucgcgauagauucaagcgaacuaguuucuuucuaugggucaucauacucuuccagcgaaccuucucaauuccacugggagucauucacaacuccaccuugcaagugucagauguggacaaguugguaugccgagacaaacucucuucuacuaaucagcucaggucuguggggcugaaccuugaagguaacggcguggccacagaugugccuucggcuacuaagcgaugggguuuccgguccggugugcccccgaaggugguaaauuaugaggcuggcgagugggccgaaaacugcuauaacuuggagauuaaaaagccugacgguagcgaauguuuaccagccgcucccgauggaauuaggggcuuucccagaugucgguauguccacaaagugucuggaacugggccuugugcuggggauuuugccuuccauaaagaaggggccuucuuucuauacgaucggcuggccaguaccgucauuuaucgaggcacuacuuucgccgaaggcguuguggcguuuuugauucucccacaggccaagaaagacuucuuuuccucacauccucuacgggagccaguaaaugcaaccgaagauccuucuaguggcuacuacuccaccacuauucgguaccaggcuaccggauucggcaccaaugagacagaauauuuauuugagguggacaaccuuacuuaugugcaguuggaaagcagguucaccccccaguuccuccugcaguugaacgagacaauuuauacaucagguaagcggucuaacacuaccgguaaguuaaucuggaaagugaaccccgagaucgacacgaccaucggggaaugggcuuuuugggagaccaagaaaaaccugacgcgcaagauuagauccgaggagcucaguuucacuguggugaguaauggcgcuaaaaauaucagugggcagagccccgcccggacaagcagcgacccugggacaaacacuacaaccgaagaccacaaaauaauggccucagaaaacaguagcgcgauggugcaagugcauagccaaggacgcgaagccgcuguaucccaucuuaccacccuggcuacgauuagcaccucgccccagucucugacuacgaagccagggccugacaauucuacacacaacacacccguguacaaacuugacaucucagaagcaacgcagguggaacagcaucaccgccggacggauaacgacagcaccgcaagcgauacccccagugcuacuacugcagccggucccccaaaagcagaaaauacgaauaccagcaagaguacagacuucuuggacccggccaccacaacaagcccacaaaaucacagcgagacugcaggcaacaauaacacacaucaccaggauacgggggaggaaucugcuucguccggcaaacucggacugaucacaaauacgaucgccgggguggccggcuugaucaccggcggcaggcggacucggagagaagccauagugaacgcucagccuaagugcaauccgaaucuacacuauuggacuacucaggacgaaggcgcagcuauuggcuuggcuuggauuccauacuuugggccagcagcagagggaauauacaucgagggacugaugcauaaccaggauggccugaucuguggccuccgacaguuggcuaaugaaacuacccaggcccuccaauuguuccugcgcgcuacaacugaacuucggaccuuuucuauuuugaacaggaaggccauagauuuccugcuucagcguuggggcggaacaugccauauccugggccccgacuguuguaucgagccucaugauuggacgaagaauauaacugauaaaauagaucaaauaauccacgacuucgucgacaagacccugccugaccagggggacaaugauaacugguggacuggauggcgacaggguaagccaaucccgaacccucuucucggucuggauagcacg

SEQ ID NO: 36 - RNA, 2203 nt, Artificial Sequence
  Synthetic polynucleotide
ucaagcuuuuggacccucguacagaagcuaauacgacucacuauagggaaauaagagagaaaagaagaguaagaagaaauauaagagccaccauggagacuccagcccagcugcuguucuuacucuuacucuggcugccugauaccacgggaauaccguuaggcguuauucauaauucgacacuccaggugucagacguggauaagcuggucugccgcgauaagcugaguaguacgaaccagcugagauccgucggucuaaaccuugagggaaaugguguggccacugacguccccagcgcgaccaagcgguggggguucaggucuggugucccaccuaaaguagugaacuacgaagcaggugagugggcagaaaacugcuacaacuuagaaaucaaaaagccagauggaucugaaugccugcccgccgcgccagaugggauccgcggcuucccaaggugccgcuacguacacaaggugagcggaaccgggccuugugccggggauuucgcuuuucauaaagagggggcguucuuuuuguaugauagauuggcgagcaccguuaucuaccgcgguaccaccuucgccgaaggcgugguggccuuucuuauccugccucaggccaaaaaggacuucuucuccagucacccguugcgcgaacccgucaaugcuaccgaggacccaucuucaggauacuauuccaccacuauacgcuaucaggccacaggcuucgggaccaaugaaacugaguaccucuuugaggucgacaaccuuacauauguccaacucgaaucacgcuucacuccucaauuucugcuucaguugaacgagacaauauauacaucaggcaagcgaucuaauacuaccggcaagcugauauggaaggugaauccagagaucgauaccacaaucggcgagugggccuuuugggagacuaagaaaaacuugacucgcaaaauccggagugaggagcugaguuucacuguggugucuaauggugcgaagaauauaagcggccaauccccugcuaggaccucuucggaucccgguacgaacacaacaacugaggaccacaagauuauggccagcgaaaauucuagcgcaaugguacaggugcauucacagggccgggaggcggcagucucucaccuaacgacacuggcgaccauaucgaccucuccacagucacugacaacuaagccuggacccgauaauuccacacacaacacccccgucuacaaguuagauauaucugaggcaacucaaguagaacaacaucaccggcgcacagacaaugacuccaccgccucugacaccccuagcgccacuacggcagcagggccaccuaaggcagagaacaccaacacaucgaaaucaaccgacuuucuggacccggcaacuaccacaucuccccagaaucauucagaaacagccggaaacaauaauacacaucaccaagauacaggcgaggagagugccagcuccggaaaguugggucucauaaccaacacaauugcuggcguugccggccuuaucacagguggcagacggacaaggagagaagcuauugugaacgcccagccuaagugcaacccaaaucuccacuacuggacgacacaggaugaaggggcagcgaucgggcuggccuggauaccuuacuuuggacccgcagcagagggcaucuauaucgagggcuugaugcacaaccaagacgggcugaucugcggccugcgccagcuggccaacgaaacuacacaggcccugcagcuguuucugcgggcuacaacugagcuccggacuuuuaguauucugaaucgaaaggccauagauuuccuucugcagagaugggguggcacaugucacauccuuggccccgauugcugcaucgaaccccacgauuggacaaaaaacauuaccgauaagauagaccagaucauacacgauuucguugacaagacauugcccgaccaaggagauaaugacaauugguggacaggauggaggcaguggauaccagcuggcauaggcgugaccggggucaucaucgcagugauugccuuguuuugcauuugcaaguucguguucugauaauaggcuggagccucgguggccaugcuucuugccccuugggccuccccccagccccuccuccccuuccugcacccguacccccguggucuuugaauaaagucugagugggcggc

SEQ ID NO: 37 - RNA, 2245 nt, Artificial Sequence
  Synthetic polynucleotide
ucaagcuuuuggacccucguacagaagcuaauacgacucacuauagggaaauaagagagaaaagaagaguaagaagaaauauaagagccaccauggagacccccgcucagcuccuguuucugcuccugcuaugguuaccagauacaacugguauuccgcucgguguuauacacaauuccacacuccaggucucagauguagauaaauuaguuugucgggauaaacugucuaguaccaaucagcuuaggucugucggucuuaaucucgaaggaaacggcguugccaccgaugugccuagcgcuacgaagagauggggcuuucgaagcggagugcccccaaagguggucaacuaugaagcuggagaaugggccgagaacugcuauaaccucgaaauaaaaaagccugacggcucugagugucugccagccgccccagauggaauuagaggguuuccacgaugcagguacguacauaaagucagcggcaccgguccaugcgcgggcgacuuugcauuucacaaagagggagccuucuuccuauacgacagguuagccagcacagugauauacagggggacuacguucgcugagggcgucguugcauuuuugauucuaccacaagcaaaaaaagacuuuuucaguucucauccucugcgagaacccguaaaugcuacugaggaccccuccucaggcuacuauucuaccacaauucguuaucaggcgacaggcuuugguacuaaugaaaccgaguaucuuuucgaaguagacaaucugacguacgugcagcucgaaucacguuucaccccacaauuccuccugcaacucaacgagacaaucuauacauccgguaaacgcaguaacacuacugggaaacucaucuggaaggugaauccugagauagacacuacuaucggcgagugggcauuuugggaaaccaaaaaaaaucugacucguaagauuagaucagaagaguuauccuuuacugucgucaguaauggagccaaaaacaucagugggcaguccccggcucggacgagcuccgaccccggcaccaauacaacuacugaagaucauaagaucauggcauccgaaaauaguuccgccaugguacaggugcacagccagggcagagaagccgcugucucacaccuuacuacgcuggcuacuauaagcaccucgccucaaucccugaccacaaagccuggucccgacaacuccacccauaacaccccuguuuacaagcuggacauuagcgaagcaacucaggucgaacagcaucacaggcguacagauaacgauagcaccgcaagugauaccccaucugccacgaccgccgccggacccccuaaggcagagaacaccaacacaucgaagucaacagauuuucuugacccagccacuaccacaucaccccagaaucacucugaaacugcuggcaacaauaauacucaucaccaggauacuggcgaagagagcgccagcucuggcaaacugggauugauuacaaacacgauugcaggaguugccggucucaucaccggagguagaagaacccgccgggaggcuauugugaacgcccagccaaaguguaacccuaaccuucauuacuggaccacucaggaugaaggagcugcaauuggccucgccuggauucccuacuucggaccagccgccgaggguauuuacaucgagggccucaugcauaaccaggauggccugaucugcggccuaaggcaguuggccaacgaaacgacgcaagcgcuccaguuauuucuucgagcaacuacagaacuacgcacuuuuucaauccugaaccgaaaagccaucgacuuucuccugcagagauggggcggcacuugucacauucuggggccugauuguuguaucgagccacaugacuggaccaaaaauaucacggacaagaucgaucagaucauucaugacuuuguggauaaaacacugccagaccaaggggauaacgauaacugguggacuggcuggcggcaguggauccccgcagguauuggggucacuggaguaauuaucgccgugauugcucuguuuugcauuugcaaguucguuuucgguaaacccauuccaaauccccuacuaggccuggacagcacaugauaauaggcuggagccucgguggccaugcuucuugccccuugggccuccccccagccccuccuccccuuccugcacccguacccccguggucuuugaauaaagucugagugggcggc

SEQ ID NO: 38 - RNA, 2125 nt, Artificial Sequence
  Synthetic polynucleotide
ucaagcuuuuggacccucguacagaagcuaauacgacucacuauagggaaauaagagagaaaagaagaguaagaagaaauauaagagccaccauggaaacaccagcccagcugcuguuucuccugcuguugugguugccagacacuacaggaaucccccuuggugugauucauaacuccacgcuucaagugucggauguagacaaacuugugugucgggauaagcuuucgucuacaaaccaauuaagaucggugggacugaaccuggaaggaaauggaguggccacugacguccccuccgcgaccaaacgguggggauuucggucaggcgugccccccaaagucgucaauuacgaggccggagagugggcagaaaacuguuauaaccucgaaaucaagaagcccgauggaucggaaugcuugccggcagccccugacgggauccgcggguucccgaggugcagauacgugcacaaagucuccggcaccggaccuugcgccggcgacuucgcguuucacaaagaaggcgcauuuuuucuguacgaucgacuugcaagcacuguuauauauagagggacgacauucgcugaaggcguuguggcauuucugauacugccccaagcuaaaaaggauuuuuuuagcucacauccacuacgggaaccggucaaugcuacugaagauccaucaagcggcuauuauucaaccaccauaagguaucaggcgacagguuuuggcacuaaugaaaccgaguaccucuuugaaguagacaaucucacuuacgugcaacuugagucccgauuuaccccucaguuucugcugcaauuaaacgagacuauuuacacuuccggcaaaaggaguaacacgacaggcaaacugaucuggaaggucaacccugagaucgauaccacgauuggcgagugggcauucugggagacuaaaaaaaaccugaccaggaagauacgguccgaagagcugucuuucacagucguuagcaacggugccaagaacauuuccggccaguccccugcccggaccucgagugaucccggaaccaauacgacaaccgaggaucauaagaucauggccagcgaaaauagcagcgcaaugguacaaguucauucccaagggcgagaagccgcggugucccaccugacuacucuggccacuauuuccacaagcccucagucguuaacaaccaaaccugggccugacaauucaacccauaacacaccuguauauaagcuggauauuucagaggcaacccaaguggaacagcaccauaggagaacggacaaugacucuacagccuccgacacccccucugcaacgaccgcugccggaccacccaaggcugaaaacaccaacacauccaagaguaccgauuuuuuggacccggcgaccacuacgaguccucagaaucacagugaaacggcagggaauaacaacacccaccaucaggauacgggcgaagagucugccaguucuggcaaguuggggcucaucacgaacaccauugccgggguggcuggucuuaucacuggaggucgcaggacgagacgugaggcuauagugaacgcacagccaaaguguaaucccaaccuucauuacuggaccacacaggacgagggagcugcaauuggguuggccuggaucccuuacuuuggacccgcagccgaaggcaucuacaucgaaggccuaaugcacaaucaggacggccuuaucugcggauugcgacagcuugccaaugaaacaacccaggcucuucaacuguuucuaagagccacaacugaguugaggacuuuuagcaucuugaauaggaaagccauagacuucuuguuacagaggugggggggcacaugucacauccucggacccgacuguuguauagagccucaugacuggaccaagaacaucacagauaagauugaccagauuauccaugauuuugucgauaaaacacuucccgaccaaggggauaaugauaacugguggaccggcuggcgccagugauaauaggcuggagccucgguggccaugcuucuugccccuugggccuccccccagccccuccuccccuuccugcacccguacccccguggucuuugaauaaagucugagugggcggc

SEQ ID NO: 39 - RNA, 2482 nt, Artificial Sequence
  Synthetic polynucleotide
ucaagcuuuuggacccucguacagaagcuaauacgacucacuauagggaaauaagagagaaaagaagaguaagaagaaauauaagagccaccauggaaacgccagcacaauuacuuuuucugcuuuugcuguggcucccugacacaacuggacaucaccaccaucaucauggcaaaccuauaccuaacccucugcugggucuggacucuaccggugauuggaaaugggauggaggccuggucccucggggcucugaugagauguugcgagagcugcaggagacuaacgcagcacuccaggacguccgcgaacuucuccgacagcagguuagacagaucaccuuccuuagauguuuacuuaugggggggagacugcucugcagauuggaagagcuggagaggcgucuggaagagcuggagcggcgccuugaggaacuggaacgggccauuaauacaguugaugaguuggccgccuugaggagacgucuggaggaacuagcacgcggcucuauaccucuagggguuauccauaauuccacgcuccagguuagugacguugacaagcuggugugccgcgauaaauuaucuuccacgaaccaguugagauccguuggacuaaaucuugagggaaacggcguugccacagacgugccaucugccaccaaaaggugggguuuccgcuccggugugccccccaaaguggugaauuacgaggcaggggaaugggcggaaaacuguuacaaucuggaaauuaagaagccugacggcagugagugucugccggccgcuccugacggaauaagaggguucccaagguguagauacgugcacaaggucucuggaaccggaccuugcgccggggacuucgccuuccacaaagaaggugcauuuuuccuauaugaccgcuuagccucgacagugauuuacaggggcaccacuuucgcagaggggguagucgcuuucuuaauuuugccucaggcgaaaaaggacuuuuuuucuagucacccccucagggagccuguaaacgcaaccgaggacccaaguagcgguuacuacuccacaacgaucagguaccaggccaccggauuuggcacaaacgaaacggaauaccuauuugaagucgacaaccugaccuacguccagcuggagucccgauucacgccccaguuccuacugcagcugaaugagacaauuuacacuucugguaaaagaaguaacaccacuggaaaacucaucuggaaggucaauccagaaauugauacaacaaucggugagugggcuuuuugggagacgaaaaaaaacuugaccagaaaaaucagguccgaggagcugaguuucacgguaguuagcaacggagcgaaaaauaucucaggacagaguccagcccgaaccucuucggauccaggcacuaauacgacaacagaagaccauaagauuauggcuagugagaacucaucugcuaugguccaggugcacucgcaaggacgcgaagcagcugugucacaucugaccacccuugcaacuaucagcacaaguccucagagcuuaaccaccaagccuggucccgacaauucuacacacaauacuccuguuuacaaauuagacaucagugaagccacccagguugaacaacaccaccggcggacggacaaugacucaacggcaucugacaccccauccgccacaacggcugccgggccaccaaaagcugagaauaccaacacaucaaagucaaccgacuucuuagaccccgcuacaaccaccuccccccaaaaucauuccgaaacugccgguaacaacaacacccaccaccaggauaccggggaggaaagcgccagcagcggcaagcuaggccugaucacaaacacaaucgccggggucgcaggccuaaucaccggaggcagacguacacgucgggaggcuauuguuaaugcccagccuaaaugcaauccgaaucuucauuauuggaccacccaggaugaaggagcugccauuggacuggcuuggaucccuuacuuuggccccgccgcugagggaauuuauauagaggggcugaugcacaaccaagauggacuaauuuguggacuccgccagcuggccaaugaaaccacccaagcuuuacaacucuuucugagagcaacaacagaacuucggacauuuucuauauugaauagaaaggcuauugauuuccuucuccagagauggggugguaccugccacauacucgguccagauuguugcauagaaccucaugacuggaccaaaaauauuacugacaaaaucgaucagaucauucacgauuucguggauaagacauuacccgaccaaggcgacaacgacaacugguggacuggauggaggcagugauaauaggcuggagccucgguggccaugcuucuugccccuugggccuccccccagccccuccuccccuuccugcacccguacccccguggucuuugaauaaagucugagugggcggc

SEQ ID NO: 40 - RNA, 2239 nt, Artificial Sequence
  Synthetic polynucleotide
ucaagcuuuuggacccucguacagaagcuaauacgacucacuauagggaaauaagagagaaaagaagaguaagaagaaauauaagagccaccaugggagucaccggcauucugcagcuccccagggaucguuucaaaagaacuuccuuuuuucuguggguaaucauccuguuccaaaggacguuuuccaucccccugggaguuauacacaacaguacauugcaggucucugacguagacaaacucgucugccgggacaaacuuucuagcacuaaucagcugcggucgguaggucugaacuuggaagguaauggugucgccacagaugugccauccgccaccaaacgcuggggguuccggucaggcgugcccccaaaagucgucaacuaugaagcaggcgaaugggcggaaaacuguuauaaucucgagaucaaaaaaccugacggguccgaguguuugcccgccgcuccugacggcaucagaggcuucccuaggugcagauauguccacaagguaucagguaccggcccaugugcuggggacuucgcuuuccacaaggaaggagcuuucuuucucuacgacaggcuggccucuaccgucauauauaggggaacuaccuucgccgaaggcguuguugccuuuuugauccugccucaggccaaaaaagacuucuuuucuucccauccccugcgggagccaguuaacgcuaccgaggacccgagcucuggcuauuacaguaccaccauccgguaucaagcuaccggauucggcacgaacgaaaccgaguaccuauucgagguggacaaccugacauauguucaacuggagucccgguucaccccccaguuucugcugcaguugaacgagaccaucuacacaagcgguaaaaggucuaauaccacuggaaaacugaucuggaaaguaaacccggagauagauaccaccauuggagaaugggcauucugggagaccaagaaaaauuugaccaggaaaauacgcucugaagaacuguccuuuacgguggugucuaauggggcgaagaacaucuccggacagagcccugcgcgcacauccucagauccaggcacaaauaccacaacagaggaucacaagauuauggcaucugagaauagcagcgcuauggugcagguucacagccaaggcagagaggccgcgguuucccaucucacaacauuggcuacuaucagcaccucuccucaaagccugacaacaaagccugguccagauaauucuacccauaauacuccaguguauaaacucgacauuucugaggcuacacaaguggagcagcaccauagaagaacagacaacgacucaacugccuccgacaccccuucagcgacaaccgccgccggcccuccuaaggcggaaaacacuaauacuucgaaaucaaccgauuuucuggauccagcgaccaccaccucgccucagaaucauucggaaacggcuggaaauaauaacacccaccaccaggacaccggcgaagaaagugccagcaguggcaagcucgggcugaucaccaauacuaucgcggggguggccgggcuaauuacaggcggcagacggaccaggagagaggccauuguaaacgcccagccuaaaugcaaccccaaccugcauuacuggaccacccaagacgagggcgccgcaauugguuuggcuuggauccccuauuuuggacccgccgccgaagggauuuauaucgaaggacugaugcacaaccaggauggccuuauuugugggcuucggcagcuggccaaugagacgacacaagcgcugcaguuauucuugagagccacuaccgagcuuaggaccuucagcauucugaaucgcaaggccaucgacuuccuguugcagcgauggggggguaccugccauauucugggcccugauugcuguauagaaccccacgacuggacgaagaauauaaccgauaaaauagaucagaucauccacgacuuugucgacaaaacacucccagaucagggcgauaacgauaauugguggaccggcuggaggcaguggaucccagcaggaaucggggugacaggcguuauuaucgcggucauagcacuguuuugcaucugcaaguucgucuuuugauaauaggcuggagccucgguggccaugcuucuugccccuugggccuccccccagccccuccuccccuuccugcacccguacccccguggucuuugaauaaagucugagugggcggc

SEQ ID NO: 41 - RNA, 2281 nt, Artificial Sequence
  Synthetic polynucleotide
ucaagcuuuuggacccucguacagaagcuaauacgacucacuauagggaaauaagagagaaaagaagaguaagaagaaauauaagagccaccaugggggugacagggauauugcagcugccucgggaucgcuucaagcgcaccuccuuuuuucugugggucaucauccucuuucagcgcacauuuagcauuccgcucggcguaauucauaauucaacucuacaagucucugacguggacaaauuggucugccgggacaaguugucuucgacaaaccaauugaggucuguagggcugaaccucgagggcaaugguguggcgacggauguacccucggccaccaagcguuggggcuuuaggucuggcguccccccuaaaguggugaacuaugaagcuggggaaugggccgaaaauugcuacaaucuggaaauuaagaaaccugacggaagcgagugucucccagcugccccagacgguauccgcggguuccccagaugcagguacguucauaaagugaguggaaccggcccaugcgccggagauuucgcauuccacaaggaaggugcuuucuuucuuuacgacaggcuagccuccacagugaucuaucgcggcaccaccuucgcagagggcgugguugccuuuuugauccugccucaggccaaaaaagacuucuucaguucucacccucugagggaaccagugaacgccaccgaggacccuuccagcggauacuacagcaccacgauccgcuaucaagcgaccgguuucgggaccaacgagacugaguaccucuuugaaguggauaaccugacauaugugcagcuggaaucucgguuuaccccgcaguuccuucuccagcugaaugaaacuauauacaccucaggcaagagauccaauaccacagguaaauugauuuggaaaguuaaucccgaaaucgacacaacgauuggggagugggccuuuugggagaccaagaaaaaucugacacgcaagaucagaagugaggaguugaguuucaccguggucagcaauggcgcgaaaaauauuuccggucaaucuccagccaggacuagcucugacccuggaacgaacacuaccacagaagaccauaagaucauggcaagugagaauucuuccgcuaugguucaggugcacucccagggccgggaagccgccgucucacaccugacaacccucgccacaaucuccacuuccccacagucccugacaaccaaacccgggccugacaacucaacacauaauacgccaguuuacaagcucgauaucucugaggcuacccagguggagcaacaccacaggcggacugacaacgacagcaccgcuagugauacccccucagccaccacugccgcagguccccccaaggccgaaaauacaaauaccaguaaaaguacggacuuccuggaccccgcaacuacaaccuccccccaaaaccacagcgaaacggcagggaauaauaauacacaccaucaggauaccggagaggaguccgcuucuuccggcaagcugggacugauaaccaacacaauugccggaguggcaggucugauuacgggagggcgcaggacuagacgggaagcaaucgugaacgcacagccaaagugcaauccuaaccugcacuacuggacuacccaagaugaaggggcagccauugggcuugcauggauccccuacuuugggccugcagcggaggggauuuauaucgaaggccugaugcauaaucaggauggauugauuugcgggcucaggcaguuggcgaaugaaacaacacaagcccuacaauuauuucugagggccacuacugaguugcgaacauuuaguauccucaauagaaaggccauagacuuccugcuccagcgcuggggcgggacuugccacauucuaggcccggacuguuguaucgaaccccaugacuggaccaagaacauaacugauaagauagaccagaucauccaugauuucguugauaaaacacugcccgaucagggugacaacgacaauugguggacuggcuggaggcaguggaucccagcuggcauugggguuacagguguuauaauugccgugauugcucucuucugcaucugcaaauuugucuucgguaaaccaauacccaauccacugcugggccuggauagcacgugauaauaggcuggagccucgguggccaugcuucuugccccuugggccuccccccagccccuccuccccuuccugcacccguacccccguggucuuugaauaaagucugagugggcggc

SEQ ID NO: 42 - RNA, 2161 nt, Artificial Sequence
  Synthetic polynucleotide
ucaagcuuuuggacccucguacagaagcuaauacgacucacuauagggaaauaagagagaaaagaagaguaagaagaaauauaagagccaccaugggagugacuggcauucuucagcuuccucgcgacagguuuaagagaaccucguucuuccugugggucauuauacuuuuccagcgcacauucagcaucccacuuggagugauucauaauucuacacuucagguuagcgacguggacaagcuggucugccgggacaaacugucgucaacaaaucagcuuagguccguaggccugaaccuugaagguaacggcguugcaacagaugugccuagcgcaacgaagcgguggggauuuaggucugguguuccaccaaaaguggucaauuacgaggccggagagugggcagagaacugcuauaaccuggaaauaaaaaagccugacgguagcgaaugccugccagccgcgccagauggcauucggggguuuccccgcugucgcuacguccacaaaguaagugguacugggccuugugccggugacuucgccuuucacaaagagggcgcguucuuuuuguaugaccgucucgccuccacaguaauuuaccgaggcacuacauuugcagaaggggugguggcauuccuuauauuaccccaggcuaaaaaggacuucuucucuagccacccacuccgggaaccagugaaugcaaccgaggauccaagcucgggguacuauucuaccacuaucagguaucaggcaacaggguuugguacaaaugagacugaauaucucuucgagguugacaaccugaccuacgugcagcuggaaagucguuucacuccgcaguuccucuugcagcucaaugagaccauauauaccagugggaaacggucuaacacaaccggaaaacugauuuggaaaguuaacccagaaauugauacuacgauuggugagugggcguuuugggagacaaagaagaauuuaacuaggaagaucagguccgaagaacugucauucacuguggugucuaacggcgcgaaaaauaucucugggcagucuccagcccgcacauccuccgauccuggaacgaauacaaccaccgaagaucauaagaucauggccagcgaaaacuccuccgccaugguccaaguccauucccaagggagggaagcugcagucucccaccucacuacuuuggcaaccauuagcacuucgccacaaagccugaccaccaagcccggcccggauaauucaacccacaacaccccaguuuauaaacuggauaucagugaggcgacucagguggagcagcaucaccgaagaacugauaaugauucuacugccagcgacaccccaagcgcgaccaccgcugccggaccucccaaggccgagaauacuaacacuucgaaaucaacagacuuucuggaucccgccacaaccacguccccacagaaucacucugaaaccgccgguaacaauaauacacaucaccaggauaccggggaggaauccgcuucuagcgggaagcugggccuuauaacaaauacgauagcagggguggccggacucaucacagggggucggaggacacggcgggaggcuauagucaaugcucagccuaaaugcaacccgaaucugcacuauuggaccacacaggacgagggagccgccaucgggcuggcauggauuccauauuucggcccagccgcugagggcaucuacaucgagggucuuaugcacaaccaggacgggcuaaucugcggacuuaggcagcuggccaacgagacaacacaggcacuccagcucuuccuucgcgcuacaacagagcuacggaccuuuuccauucucaacaggaaggccauagacuuccucuugcagcgguggggaggcaccugucauauucucgggcccgauuguuguaucgaaccucaugauuggaccaaaaauauuacagauaagauugaucaaaucauccacgauuucguagauaagacacuccccgaccagggagacaaugacaacugguggacgggguggcgacagugauaauaggcuggagccucgguggccaugcuucuugccccuugggccuccccccagccccuccuccccuuccugcacccguacccccguggucuuugaauaaagucugagugggcggc

SEQ ID NO: 43 - RNA, 2203 nt, Artificial Sequence
  Synthetic polynucleotide
ucaagcuuuuggacccucguacagaagcuaauacgacucacuauagggaaauaagagagaaaagaagaguaagaagaaauauaagagccaccaugggcgugacugggauccuccaacugccucgcgauagauucaagcgaacuaguuucuuucuaugggucaucauacucuuccagcgaaccuucucaauuccacugggagucauucacaacuccaccuugcaagugucagauguggacaaguugguaugccgagacaaacucucuucuacuaaucagcucaggucuguggggcugaaccuugaagguaacggcguggccacagaugugccuucggcuacuaagcgaugggguuuccgguccggugugcccccgaaggugguaaauuaugaggcuggcgagugggccgaaaacugcuauaacuuggagauuaaaaagccugacgguagcgaauguuuaccagccgcucccgauggaauuaggggcuuucccagaugucgguauguccacaaagugucuggaacugggccuugugcuggggauuuugccuuccauaaagaaggggccuucuuucuauacgaucggcuggccaguaccgucauuuaucgaggcacuacuuucgccgaaggcguuguggcguuuuugauucucccacaggccaagaaagacuucuuuuccucacauccucuacgggagccaguaaaugcaaccgaagauccuucuaguggcuacuacuccaccacuauucgguaccaggcuaccggauucggcaccaaugagacagaauauuuauuugagguggacaaccuuacuuaugugcaguuggaaagcagguucaccccccaguuccuccugcaguugaacgagacaauuuauacaucagguaagcggucuaacacuaccgguaaguuaaucuggaaagugaaccccgagaucgacacgaccaucggggaaugggcuuuuugggagaccaagaaaaaccugacgcgcaagauuagauccgaggagcucaguuucacuguggugaguaauggcgcuaaaaauaucagugggcagagccccgcccggacaagcagcgacccugggacaaacacuacaaccgaagaccacaaaauaauggccucagaaaacaguagcgcgauggugcaagugcauagccaaggacgcgaagccgcuguaucccaucuuaccacccuggcuacgauuagcaccucgccccagucucugacuacgaagccagggccugacaauucuacacacaacacacccguguacaaacuugacaucucagaagcaacgcagguggaacagcaucaccgccggacggauaacgacagcaccgcaagcgauacccccagugcuacuacugcagccggucccccaaaagcagaaaauacgaauaccagcaagaguacagacuucuuggacccggccaccacaacaagcccacaaaaucacagcgagacugcaggcaacaauaacacacaucaccaggauacgggggaggaaucugcuucguccggcaaacucggacugaucacaaauacgaucgccgggguggccggcuugaucaccggcggcaggcggacucggagagaagccauagugaacgcucagccuaagugcaauccgaaucuacacuauuggacuacucaggacgaaggcgcagcuauuggcuuggcuuggauuccauacuuugggccagcagcagagggaauauacaucgagggacugaugcauaaccaggauggccugaucuguggccuccgacaguuggcuaaugaaacuacccaggcccuccaauuguuccugcgcgcuacaacugaacuucggaccuuuucuauuuugaacaggaaggccauagauuuccugcuucagcguuggggcggaacaugccauauccugggccccgacuguuguaucgagccucaugauuggacgaagaauauaacugauaaaauagaucaaauaauccacgacuucgucgacaagacccugccugaccagggggacaaugauaacugguggacuggauggcgacaggguaagccaaucccgaacccucuucucggucuggauagcacgugauaauaggcuggagccucgguggccaugcuucuugccccuugggccuccccccagccccuccuccccuuccugcacccguacccccguggucuuugaauaaagucugagugggcggc

SEQ ID NO: 44 - RNA, 2428 nt, Artificial Sequence
  Synthetic polynucleotide
ucaagcuuuuggacccucguacagaagcuaauacgacucacuauagggaaauaagagagaaaagaagaguaagaagaaauauaagagccaccauggacaguaggccccagaagaucuggauggcaccaucucucacugagagugauauggacuaucauaagauccugacggcagggcugagcgugcagcaaggcaucgucaggcagcgggugaucccaguauaucaggucaacaaccuugaggagauuugucaacugauaauucaggccuuugaagccggcgucgacuuucaagaaagugcagauagcuuucuccugaugcuguguuugcaccaugcguaccagggcgacuauaagcuguuccuggagucuggggcuguuaaguaccuggaggggcacgguuucagguuugaggugaagaagcgggacggcgucaagagguuagaggaacugcugccagcagugagcucugguaagaauauuaaaaggacccucgcugcaaugccggaggaggaaaccacagaggcaaacgcuggccaguuccugagcuucgcaucucuuuuucuaccgaagcuagugguaggagaaaaagcuugccucgaaaagguacagagacagauccagguucacgcugaacaggggcuuauccaguacccaaccgcuuggcagucggugggucacaugauggugauuuucagacugaugcggacaaauuuucugauuaaguuccugcuuauucaccaggggaugcauaugguggcaggccacgaugcaaaugacgccguaaucucuaauagcguugcucaagcgcgcuucucugggcugcugaucgugaaaacagugcuggaucauaucuuacaaaagacugagaggggugugaggcugcacccccuggcuagaaccgcaaaggucaagaaugaagugaauucguuuaaggcugcccucucuucacucgccaaacacggggaguacgcgccuuucgcaagacugcugaaccuuucaggggugaacaaucuugagcauggauuguuuccacaguuguccgccauugcacugggcguggcaacagcacacggguccacucuggccggugugaacguuggggagcaguaucaacagcucagggaagcugccacugaggccgagaaacagcuccagcaguacgccgagucccgcgaauuggaucaccucggccucgacgaccaggaaaagaagauucugaugaauuuucaucaaaaaaaaaacgagauuucauuucaacagaccaacgcaauggugacucuuagaaaagagcgccuagccaaauuaacggaggccauaaccgcagccagccuaccaaagacaucugggcacuacgacgacgacgacgacaucccguuucccgguccaauuaaugacgacgacaaucccggccaccaagacgacgacccaacugacucgcaggacaccacgauucccgaugucgugguggaccccgaugacgggagcuacggagaauaucaaagcuacucugagaacggcaugaaugcacccgacgaucuggugcuguuugacuuggacgaggacgaugaagauacuaagcccgugcccaauaggucaacuaaaggcggccagcagaaaaauucccaaaaggggcagcacaucgagggcagacaaacacaauccagaccuauacagaaugugccuggaccccaccgcacuauucaccacgcaagugcuccucugaccgacaaugaucgcaggaaugagccaucugguuccacaucuccgagaaugcuuacaccuaucaacgaagaggccgacccgcucgacgaugcggacgacgagaccucuaguuugccuccucuugagucagaugacgaagaacaggaccgggauggaacaucgaauagaacuccuacaguggcuccgcccgcuccaguauaccgcgaucacagugagaagaaggagcugccacaggaugaacaacaggaccaggaucacacccaagaagcacguaaccaggacucggauaacacucagucagaacacucuuuugaggagauguaucggcacauucuucgaucgcaagguccauuugacgcaguccucuacuaccacaugaugaaggaugaacccgucguuuuuuccacaagcgaugggaaagaguauacauacccggauuccuuggaggaggaguacccgcccuggcugacagagaaagaggcgaugaacgaggagaaccgcuuuguaacucuggacggucagcaauuuuauuggcccguuaugaaucacaagaacaaguucauggcuaucuugcaacaucaccagugauaauaggcuggagccucgguggccaugcuucuugccccuugggccuccccccagccccuccuccccuuccugcacccguacccccguggucuuugaauaaagucugagugggcggc

SEQ ID NO: 45 - DNA, 1992 bp, Artificial Sequence
  Synthetic polynucleotide
atggaaacccctgctcagctgctgttcctgctgctgctgtggctgcctgatacaaccggaatgcctctgggcgtcgtgaccaacagcaccctggaagtgaccgagatcgaccagctcgtgtgcaaggatcacctggccagcaccgatcagctgaagtccgtgggcctgaatctggaaggctctggcgtgtccacagacatccctagcgccacaaagagatggggcttcagatcaggcgtgccacctaaggtggtgtcttatgaggctggcgagtgggccgagaactgctacaacctggaaatcaagaagcccgacggcagcgagtgtctgcctcctcctcctgatggtgttcggggcttccccagatgcagatacgtgcacaaagcccaaggcacaggcccctgtcctggcgattatgcctttcacaaggacggcgctttcttcctgtacgaccggctggcctctaccgtgatctacagaggcgtgaactttgccgagggcgtgatcgcctttctgatcctggccaagcctaaagagacattcctgcagagccctccaatccgcgaggccgtgaactacaccgagaacaccagcagctactacgccaccagctacctggaatacgagatcgagaacttcggcgcccagcacagcaccacactgttcaagatcgacaacaacaccttcgtgcggctggacagaccccacacacctcagtttctgttccagctgaacgacaccatccatctgcatcagcagctgtccaacaccaccggcagactgatctggaccctggacgccaacatcaacgccgatattggagagtgggccttctgggagaacaagaagaacctgagcgaacagctgagaggcgaggaactgagctttgaggccctgagcctgaacgagacagaggacgatgatgccgccagcagcagaatcaccaagggcagaatcagcgaccgggccaccagacagtacagcgatctggtgcccaagaatcctcctggcatggtgcctctgcacatccctgagggcgaaaccacactgcccagccagaatagcactgaaggcagacgggtgtccgtgaacacccaagagacaatcacagagacagccgccaccatcatcggcaccaacggcaaccacatgcagatcagcaccatcggcatcagacccagcagctctcagatccctagcagcagccctaccaccgctccatctccagaagctcagacccctaccacacacacatctggcccaagcgtgatggccaccgaggaacctacaacacctcctggctctagccccggaccaacaacagaagcccctacactgaccacacctgagaacatcaccaccgccgtcaagaccgtgctgcctcaagagtctaccagcaacggcctgatcaccagcaccgtgacaggcatcctgggatctctgggcctgagaaagagaagcagacggcagaccaacaccaaggccaccggcaagtgcaaccccaacctgcactattggacagcccaagagcagcacaatgccgccggaatcgcctggattccttactttggacctggcgccgagggcatctataccgagggactgatgcacaaccagaacgccctcgtgtgtggcctgagacagctggccaatgagacaactcaggccctgcagctgtttctgagagccaccaccgagctgcggacctacaccatcctgaaccggaaggccatcgactttctgctgagaagatggggcggcacctgtagaatcctgggacctgattgctgcatcgagccccacgactggaccaagaatatcaccgacaagatcaaccagatcatccacgacttcatcgacaaccctctgcctaaccaggacaacgacgacaactggtggacaggatggcggcagtggattcctgccggcatcggaatcaccggcatcattatcgccatcattgccctgctgtgcgtgtgcaaactgctgtgc

SEQ ID NO: 46 - protein, 664 aa, Artificial Sequence
  Synthetic polypeptide
METPAQLLFLLLLWLPDTTGMPLGVVTNSTLEVTEIDQLVCKDHLASTDQLKSVGLNLEGSGVSTDIPSATKRWGFRSGVPPKVVSYEAGEWAENCYNLEIKKPDGSECLPPPPDGVRGFPRCRYVHKAQGTGPCPGDYAFHKDGAFFLYDRLASTVIYRGVNFAEGVIAFLILAKPKETFLQSPPIREAVNYTENTSSYYATSYLEYEIENFGAQHSTTLFKIDNNTFVRLDRPHTPQFLFQLNDTIHLHQQLSNTTGRLIWTLDANINADIGEWAFWENKKNLSEQLRGEELSFEALSLNETEDDDAASSRITKGRISDRATRQYSDLVPKNPPGMVPLHIPEGETTLPSQNSTEGRRVSVNTQETITETAATIIGTNGNHMQISTIGIRPSSSQIPSSSPTTAPSPEAQTPTTHTSGPSVMATEEPTTPPGSSPGPTTEAPTLTTPENITTAVKTVLPQESTSNGLITSTVTGILGSLGLRKRSRRQTNTKATGKCNPNLHYWTAQEQHNAAGIAWIPYFGPGAEGIYTEGLMHNQNALVCGLRQLANETTQALQLFLRATTELRTYTILNRKAIDFLLRRWGGTCRILGPDCCIEPHDWTKNITDKINQIIHDFIDNPLPNQDNDDNWWTGWRQWIPAGIGITGIIIAIIALLCVCKLLC

SEQ ID NO: 47 - protein, 644 aa, Artificial Sequence
  Synthetic polypeptide
MPLGVVTNSTLEVTEIDQLVCKDHLASTDQLKSVGLNLEGSGVSTDIPSATKRWGFRSGVPPKVVSYEAGEWAENCYNLEIKKPDGSECLPPPPDGVRGFPRCRYVHKAQGTGPCPGDYAFHKDGAFFLYDRLASTVIYRGVNFAEGVIAFLILAKPKETFLQSPPIREAVNYTENTSSYYATSYLEYEIENFGAQHSTTLFKIDNNTFVRLDRPHTPQFLFQLNDTIHLHQQLSNTTGRLIWTLDANINADIGEWAFWENKKNLSEQLRGEELSFEALSLNETEDDDAASSRITKGRISDRATRQYSDLVPKNPPGMVPLHIPEGETTLPSQNSTEGRRVSVNTQETITETAATIIGTNGNHMQISTIGIRPSSSQIPSSSPTTAPSPEAQTPTTHTSGPSVMATEEPTTPPGSSPGPTTEAPTLTTPENITTAVKTVLPQESTSNGLITSTVTGILGSLGLRKRSRRQTNTKATGKCNPNLHYWTAQEQHNAAGIAWIPYFGPGAEGIYTEGLMHNQNALVCGLRQLANETTQALQLFLRATTELRTYTILNRKAIDFLLRRWGGTCRILGPDCCIEPHDWTKNITDKINQIIHDFIDNPLPNQDNDDNWWTGWRQWIPAGIGITGIIIAIIALLCVCKLLC

SEQ ID NO: 48 - RNA, 1992 nt, Artificial Sequence
  Synthetic polynucleotide
auggaaaccccugcucagcugcuguuccugcugcugcuguggcugccugauacaaccggaaugccucugggcgucgugaccaacagcacccuggaagugaccgagaucgaccagcucgugugcaaggaucaccuggccagcaccgaucagcugaaguccgugggccugaaucuggaaggcucuggcguguccacagacaucccuagcgccacaaagagauggggcuucagaucaggcgugccaccuaagguggugucuuaugaggcuggcgagugggccgagaacugcuacaaccuggaaaucaagaagcccgacggcagcgagugucugccuccuccuccugaugguguucggggcuuccccagaugcagauacgugcacaaagcccaaggcacaggccccuguccuggcgauuaugccuuucacaaggacggcgcuuucuuccuguacgaccggcuggccucuaccgugaucuacagaggcgugaacuuugccgagggcgugaucgccuuucugauccuggccaagccuaaagagacauuccugcagagcccuccaauccgcgaggccgugaacuacaccgagaacaccagcagcuacuacgccaccagcuaccuggaauacgagaucgagaacuucggcgcccagcacagcaccacacuguucaagaucgacaacaacaccuucgugcggcuggacagaccccacacaccucaguuucuguuccagcugaacgacaccauccaucugcaucagcagcuguccaacaccaccggcagacugaucuggacccuggacgccaacaucaacgccgauauuggagagugggccuucugggagaacaagaagaaccugagcgaacagcugagaggcgaggaacugagcuuugaggcccugagccugaacgagacagaggacgaugaugccgccagcagcagaaucaccaagggcagaaucagcgaccgggccaccagacaguacagcgaucuggugcccaagaauccuccuggcauggugccucugcacaucccugagggcgaaaccacacugcccagccagaauagcacugaaggcagacggguguccgugaacacccaagagacaaucacagagacagccgccaccaucaucggcaccaacggcaaccacaugcagaucagcaccaucggcaucagacccagcagcucucagaucccuagcagcagcccuaccaccgcuccaucuccagaagcucagaccccuaccacacacacaucuggcccaagcgugauggccaccgaggaaccuacaacaccuccuggcucuagccccggaccaacaacagaagccccuacacugaccacaccugagaacaucaccaccgccgucaagaccgugcugccucaagagucuaccagcaacggccugaucaccagcaccgugacaggcauccugggaucucugggccugagaaagagaagcagacggcagaccaacaccaaggccaccggcaagugcaaccccaaccugcacuauuggacagcccaagagcagcacaaugccgccggaaucgccuggauuccuuacuuuggaccuggcgccgagggcaucuauaccgagggacugaugcacaaccagaacgcccucguguguggccugagacagcuggccaaugagacaacucaggcccugcagcuguuucugagagccaccaccgagcugcggaccuacaccauccugaaccggaaggccaucgacuuucugcugagaagauggggcggcaccuguagaauccugggaccugauugcugcaucgagccccacgacuggaccaagaauaucaccgacaagaucaaccagaucauccacgacuucaucgacaacccucugccuaaccaggacaacgacgacaacugguggacaggauggcggcaguggauuccugccggcaucggaaucaccggcaucauuaucgccaucauugcccugcugugcgugugcaaacugcugugc

SEQ ID NO: 49 - DNA, 1992 bp, Artificial Sequence
  Synthetic polynucleotide
atggaaacccctgctcagctgctgttcctgctgctgctgtggctgcctgataccacaggcattcctctgggcgtgatccacaacagcacactccaggtgtccgacgtggacaagctcgtgtgcagagacaagctgtccagcaccaaccagctgagaagcgtgggcctgaacctggaaggcaatggcgtggcaacagatgtgcccagcgtgaccaagagatggggctttagaagcggcgtgccacctaaggtggtcaactatgaagccggcgagtgggccgagaactgctacaacctggaaatcaagaagcccgacggcagcgagtgtctgcctgctgctcctgatggaatcagaggcttccccagatgcagatacgtgcacaaggtgtccggcacaggaccttgcgctggcgatttcgcctttcacaaagagggcgctttcttcctgtacgaccggctggcctctaccgtgatctacagaggcaccacctttgccgaaggcgtggtggcctttctgattctgcctcaggccaagaaggacttcttcagctctcaccctctgcgcgagcccgtgaatgccacagaagatcctagcagcggctactacagcaccaccatcagataccaggccaccggcttcggcaccaacgagacagagtacctgttcgaggtggacaacctgacctacgtgcagctggaaagccggttcacccctcagtttctgctgcagctgaacgagacaatctacgccagcggcaagcggagcaataccaccggaaagctgatctggaaagtgaaccccgagatcgataccacaatcggagagtgggccttctgggagacaaagaagaccagcctcgagaagttcgccgtgaagtcctgtctgagcaccgccgtgtctaacggccccaagaatatcagcggccagtctcctgccagaaccagcagcgaccctgagacaaacaccaccaatgaggaccacaagatcatggccagcgagaacagctccgccatggtccaggtgcactctcagggaagaaaggccgctgtgtcccacctgacaaccctggccaccatctctacaagccctcagcctcctaccaccaagacaggccccgataacagcacccacaacacccctgtgtacaagctggacatcagcgaggccacacaagtgggccagcatcacagaagggccgacaacgatagcaccgccagcgatacacctccagccacaactgctgccggacctctgaaagccgagaacaccaacacaagcaagagcgccgacagcctggatctggccacaacaacaagcccacagaactacagcgagacagccggcaacaacaacacccaccaccaggatacaggcgaggaatctgccagctctggcaagctgggactgatcaccaataccattgctggcgtggccggcctgattaccggtggtagaagaaccagacgggaagtgatcgtgaacgcccagcctaagtgcaaccccaacctgcactactggaccacacaggatgagggcgctgctatcggactggcctggattccttactttggacctgccgccgagggcatctataccgagggactgatgcacaaccaggacggcctgatctgtggcctgagacagctggccaacgaaaccactcaggccctgcagctgtttctgagagccaccacagagctgcggaccttcagcatcctgaacagaaaggctatcgacttcttgctgcaaagatggggcggcacctgtcacatcctgggacctgattgctgcatcgagccccacgactggaccaagaacatcaccgacaagatcgaccagatcatccacgactttgtggacaagaccctgcctgaccagggcgacaatgacaattggtggacaggatggcggcagtggattcctgccggaattggagtgaccggcgtgatcattgccgtgatcgccctgttctgtatctgcaagttcgtgttc

SEQ ID NO: 50 - protein, 664 aa, Artificial Sequence
  Synthetic polypeptide
METPAQLLFLLLLWLPDTTGIPLGVIHNSTLQVSDVDKLVCRDKLSSTNQLRSVGLNLEGNGVATDVPSVTKRWGFRSGVPPKVVNYEAGEWAENCYNLEIKKPDGSECLPAAPDGIRGFPRCRYVHKVSGTGPCAGDFAFHKEGAFFLYDRLASTVIYRGTTFAEGVVAFLILPQAKKDFFSSHPLREPVNATEDPSSGYYSTTIRYQATGFGTNETEYLFEVDNLTYVQLESRFTPQFLLQLNETIYASGKRSNTTGKLIWKVNPEIDTTIGEWAFWETKKTSLEKFAVKSCLSTAVSNGPKNISGQSPARTSSDPETNTTNEDHKIMASENSSAMVQVHSQGRKAAVSHLTTLATISTSPQPPTTKTGPDNSTHNTPVYKLDISEATQVGQHHRRADNDSTASDTPPATTAAGPLKAENTNTSKSADSLDLATTTSPQNYSETAGNNNTHHQDTGEESASSGKLGLITNTIAGVAGLITGGRRTRREVIVNAQPKCNPNLHYWTTQDEGAAIGLAWIPYFGPAAEGIYTEGLMHNQDGLICGLRQLANETTQALQLFLRATTELRTFSILNRKAIDFLLQRWGGTCHILGPDCCIEPHDWTKNITDKIDQIIHDFVDKTLPDQGDNDNWWTGWRQWIPAGIGVTGVIIAVIALFCICKFVF

SEQ ID NO: 51 - protein, 644 aa, Artificial Sequence
  Synthetic polypeptide
IPLGVIHNSTLQVSDVDKLVCRDKLSSTNQLRSVGLNLEGNGVATDVPSVTKRWGFRSGVPPKVVNYEAGEWAENCYNLEIKKPDGSECLPAAPDGIRGFPRCRYVHKVSGTGPCAGDFAFHKEGAFFLYDRLASTVIYRGTTFAEGVVAFLILPQAKKDFFSSHPLREPVNATEDPSSGYYSTTIRYQATGFGTNETEYLFEVDNLTYVQLESRFTPQFLLQLNETIYASGKRSNTTGKLIWKVNPEIDTTIGEWAFWETKKTSLEKFAVKSCLSTAVSNGPKNISGQSPARTSSDPETNTTNEDHKIMASENSSAMVQVHSQGRKAAVSHLTTLATISTSPQPPTTKTGPDNSTHNTPVYKLDISEATQVGQHHRRADNDSTASDTPPATTAAGPLKAENTNTSKSADSLDLATTTSPQNYSETAGNNNTHHQDTGEESASSGKLGLITNTIAGVAGLITGGRRTRREVIVNAQPKCNPNLHYWTTQDEGAAIGLAWIPYFGPAAEGIYTEGLMHNQDGLICGLRQLANETTQALQLFLRATTELRTFSILNRKAIDFLLQRWGGTCHILGPDCCIEPHDWTKNITDKIDQIIHDFVDKTLPDQGDNDNWWTGWRQWIPAGIGVTGVIIAVIALFCICKFVF

SEQ ID NO: 52 - RNA, 1992 nt, Artificial Sequence
  Synthetic polynucleotide
auggaaaccccugcucagcugcuguuccugcugcugcuguggcugccugauaccacaggcauuccucugggcgugauccacaacagcacacuccagguguccgacguggacaagcucgugugcagagacaagcuguccagcaccaaccagcugagaagcgugggccugaaccuggaaggcaauggcguggcaacagaugugcccagcgugaccaagagauggggcuuuagaagcggcgugccaccuaagguggucaacuaugaagccggcgagugggccgagaacugcuacaaccuggaaaucaagaagcccgacggcagcgagugucugccugcugcuccugauggaaucagaggcuuccccagaugcagauacgugcacaagguguccggcacaggaccuugcgcuggcgauuucgccuuucacaaagagggcgcuuucuuccuguacgaccggcuggccucuaccgugaucuacagaggcaccaccuuugccgaaggcgugguggccuuucugauucugccucaggccaagaaggacuucuucagcucucacccucugcgcgagcccgugaaugccacagaagauccuagcagcggcuacuacagcaccaccaucagauaccaggccaccggcuucggcaccaacgagacagaguaccuguucgagguggacaaccugaccuacgugcagcuggaaagccgguucaccccucaguuucugcugcagcugaacgagacaaucuacgccagcggcaagcggagcaauaccaccggaaagcugaucuggaaagugaaccccgagaucgauaccacaaucggagagugggccuucugggagacaaagaagaccagccucgagaaguucgccgugaaguccugucugagcaccgccgugucuaacggccccaagaauaucagcggccagucuccugccagaaccagcagcgacccugagacaaacaccaccaaugaggaccacaagaucauggccagcgagaacagcuccgccaugguccaggugcacucucagggaagaaaggccgcugugucccaccugacaacccuggccaccaucucuacaagcccucagccuccuaccaccaagacaggccccgauaacagcacccacaacaccccuguguacaagcuggacaucagcgaggccacacaagugggccagcaucacagaagggccgacaacgauagcaccgccagcgauacaccuccagccacaacugcugccggaccucugaaagccgagaacaccaacacaagcaagagcgccgacagccuggaucuggccacaacaacaagcccacagaacuacagcgagacagccggcaacaacaacacccaccaccaggauacaggcgaggaaucugccagcucuggcaagcugggacugaucaccaauaccauugcuggcguggccggccugauuaccggugguagaagaaccagacgggaagugaucgugaacgcccagccuaagugcaaccccaaccugcacuacuggaccacacaggaugagggcgcugcuaucggacuggccuggauuccuuacuuuggaccugccgccgagggcaucuauaccgagggacugaugcacaaccaggacggccugaucuguggccugagacagcuggccaacgaaaccacucaggcccugcagcuguuucugagagccaccacagagcugcggaccuucagcauccugaacagaaaggcuaucgacuucuugcugcaaagauggggcggcaccugucacauccugggaccugauugcugcaucgagccccacgacuggaccaagaacaucaccgacaagaucgaccagaucauccacgacuuuguggacaagacccugccugaccagggcgacaaugacaauugguggacaggauggcggcaguggauuccugccggaauuggagugaccggcgugaucauugccgugaucgcccuguucuguaucugcaaguucguguuc

SEQ ID NO: 53 - DNA, 1992 bp, Artificial Sequence
  Synthetic polynucleotide
atggaaacccctgctcagctgctgttcctgctgctgctgtggctgcctgataccacaggcatccctctgggagtcgtgcacaacaacacactccaggtgtccgacatcgacaagctcgtgtgcagagacaagctgtccagcaccagccagctgaagtccgtgggcctgaaccttgaaggcaatggcgtggccaccgatgtgcctaccgctacaaagagatggggcttcagagctggcgtgccacctaaggtggtcaattatgaggccggcgagtgggccgagaactgctacaacctggacatcaagaaggccgacggcagcgagtgtctgcctgaagctcctgaaggcgtgcggggcttccctagatgtagatacgtgcacaaggtgtccggcacaggcccttgtcctgagggcttcgcctttcacaaagagggcgctttcttcctgtacgaccggctggcctccaccatcatctacagaagcaccaccttcagcgaaggcgtggtggcctttctgatcctgcctaagaccaagaaggacttctttcagagccctccactgcacgagcccgccaacatgacaacagaccccagcagctactaccacaccgtgacactgaactacgtggccgacaacttcgggaccaatatgaccaacttcctgttccaagtggaccacctgacctacgtgcagctggaacccaggttcacccctcagtttctggtgcagctgaacgagacaatctacaccaacggcaggcggagcaacaccaccggaacactgatctggaaagtgaaccccaccgtggatacaggcgttggagaatgggccttctgggagaacaagaagaacttcaccaagacactgagcagcgaggaactgtccgtgatcctggtgcctagagcacaggaccctggcagcaaccagaagaccaaagtcacccctaccagcttcgccaacaaccagaccagcaagaaccacgaggacctggtgccaaaggatcctgccagtgtggtgcaagtgcgagatctgcagcgcgagaacaccgtgcctacaagccctctgaataccgtgccaaccacactgatccccgacaccatggaagaacagaccacaagccactacgagctgcccaacatcagcggcaaccaccaagagcggaacaacacagctcaccccgagacactggccaacaatcctccagacaacaccacacctagcacacctccacaggacggcgagagaacaagcagccacacaaccccatctccacggccagtgcctaccagcacaattcaccccaccaccagagagacacagatccctaccaccatgatcaccagccacgacaccgacagcaacaggcccaatcctatcgacatcagcgagagcacagagcccggcctgctgaccaataccattcgcggagtggccaatctgctgaccggctccagaaggaccagaagagagatcaccctgcggacccaggccaagtgcaaccccaatctgcactactggaccacacaggatgagggcgctgctatcggactggcctggattccttactttggacctgccgccgagggcatctacacagagggcatcatgcacaaccagaacggcctgatctgcggcctgagacagctggctaacgagactacacaggctctgcagctgtttctgagagccaccaccgagctgcggaccttcagcatcctgaaccggaaggccatcgactttctgctgcaaagatggggcggcacctgtcacatcctgggacctgattgctgcatcgagccccacgactggaccaagaacatcaccgacaagatcgaccagatcatccacgacttcatcgataagcccctgcctgaccagaccgacaacgacaattggtggacaggatggcggcagtgggtgccagccggaattggaatcaccggcgtgatcattgccgtgatcgctctgctgtgcatctgcaagtttctgctg

SEQ ID NO: 54 - protein, 664 aa, Artificial Sequence
  Synthetic polypeptide
METPAQLLFLLLLWLPDTTGIPLGVVHNNTLQVSDIDKLVCRDKLSSTSQLKSVGLNLEGNGVATDVPTATKRWGFRAGVPPKVVNYEAGEWAENCYNLDIKKADGSECLPEAPEGVRGFPRCRYVHKVSGTGPCPEGFAFHKEGAFFLYDRLASTIIYRSTTFSEGVVAFLILPKTKKDFFQSPPLHEPANMTTDPSSYYHTVTLNYVADNFGTNMTNFLFQVDHLTYVQLEPRFTPQFLVQLNETIYTNGRRSNTTGTLIWKVNPTVDTGVGEWAFWENKKNFTKTLSSEELSVILVPRAQDPGSNQKTKVTPTSFANNQTSKNHEDLVPKDPASVVQVRDLQRENTVPTSPLNTVPTTLIPDTMEEQTTSHYELPNISGNHQERNNTAHPETLANNPPDNTTPSTPPQDGERTSSHTTPSPRPVPTSTIHPTTRETQIPTTMITSHDTDSNRPNPIDISESTEPGLLTNTIRGVANLLTGSRRTRREITLRTQAKCNPNLHYWTTQDEGAAIGLAWIPYFGPAAEGIYTEGIMHNQNGLICGLRQLANETTQALQLFLRATTELRTFSILNRKAIDFLLQRWGGTCHILGPDCCIEPHDWTKNITDKIDQIIHDFIDKPLPDQTDNDNWWTGWRQWVPAGIGITGVIIAVIALLCICKFLL

SEQ ID NO: 55 - protein, 644 aa, Artificial Sequence
  Synthetic polypeptide
IPLGVVHNNTLQVSDIDKLVCRDKLSSTSQLKSVGLNLEGNGVATDVPTATKRWGFRAGVPPKVVNYEAGEWAENCYNLDIKKADGSECLPEAPEGVRGFPRCRYVHKVSGTGPCPEGFAFHKEGAFFLYDRLASTIIYRSTTFSEGVVAFLILPKTKKDFFQSPPLHEPANMTTDPSSYYHTVTLNYVADNFGTNMTNFLFQVDHLTYVQLEPRFTPQFLVQLNETIYTNGRRSNTTGTLIWKVNPTVDTGVGEWAFWENKKNFTKTLSSEELSVILVPRAQDPGSNQKTKVTPTSFANNQTSKNHEDLVPKDPASVVQVRDLQRENTVPTSPLNTVPTTLIPDTMEEQTTSHYELPNISGNHQERNNTAHPETLANNPPDNTTPSTPPQDGERTSSHTTPSPRPVPTSTIHPTTRETQIPTTMITSHDTDSNRPNPIDISESTEPGLLTNTIRGVANLLTGSRRTRREITLRTQAKCNPNLHYWTTQDEGAAIGLAWIPYFGPAAEGIYTEGIMHNQNGLICGLRQLANETTQALQLFLRATTELRTFSILNRKAIDFLLQRWGGTCHILGPDCCIEPHDWTKNITDKIDQIIHDFIDKPLPDQTDNDNWWTGWRQWVPAGIGITGVIIAVIALLCICKFLL

SEQ ID NO: 56 - RNA, 1992 nt, Artificial Sequence
  Synthetic polynucleotide
auggaaaccccugcucagcugcuguuccugcugcugcuguggcugccugauaccacaggcaucccucugggagucgugcacaacaacacacuccagguguccgacaucgacaagcucgugugcagagacaagcuguccagcaccagccagcugaaguccgugggccugaaccuugaaggcaauggcguggccaccgaugugccuaccgcuacaaagagauggggcuucagagcuggcgugccaccuaagguggucaauuaugaggccggcgagugggccgagaacugcuacaaccuggacaucaagaaggccgacggcagcgagugucugccugaagcuccugaaggcgugcggggcuucccuagauguagauacgugcacaagguguccggcacaggcccuuguccugagggcuucgccuuucacaaagagggcgcuuucuuccuguacgaccggcuggccuccaccaucaucuacagaagcaccaccuucagcgaaggcgugguggccuuucugauccugccuaagaccaagaaggacuucuuucagagcccuccacugcacgagcccgccaacaugacaacagaccccagcagcuacuaccacaccgugacacugaacuacguggccgacaacuucgggaccaauaugaccaacuuccuguuccaaguggaccaccugaccuacgugcagcuggaacccagguucaccccucaguuucuggugcagcugaacgagacaaucuacaccaacggcaggcggagcaacaccaccggaacacugaucuggaaagugaaccccaccguggauacaggcguuggagaaugggccuucugggagaacaagaagaacuucaccaagacacugagcagcgaggaacuguccgugauccuggugccuagagcacaggacccuggcagcaaccagaagaccaaagucaccccuaccagcuucgccaacaaccagaccagcaagaaccacgaggaccuggugccaaaggauccugccaguguggugcaagugcgagaucugcagcgcgagaacaccgugccuacaagcccucugaauaccgugccaaccacacugauccccgacaccauggaagaacagaccacaagccacuacgagcugcccaacaucagcggcaaccaccaagagcggaacaacacagcucaccccgagacacuggccaacaauccuccagacaacaccacaccuagcacaccuccacaggacggcgagagaacaagcagccacacaaccccaucuccacggccagugccuaccagcacaauucaccccaccaccagagagacacagaucccuaccaccaugaucaccagccacgacaccgacagcaacaggcccaauccuaucgacaucagcgagagcacagagcccggccugcugaccaauaccauucgcggaguggccaaucugcugaccggcuccagaaggaccagaagagagaucacccugcggacccaggccaagugcaaccccaaucugcacuacuggaccacacaggaugagggcgcugcuaucggacuggccuggauuccuuacuuuggaccugccgccgagggcaucuacacagagggcaucaugcacaaccagaacggccugaucugcggccugagacagcuggcuaacgagacuacacaggcucugcagcuguuucugagagccaccaccgagcugcggaccuucagcauccugaaccggaaggccaucgacuuucugcugcaaagauggggcggcaccugucacauccugggaccugauugcugcaucgagccccacgacuggaccaagaacaucaccgacaagaucgaccagaucauccacgacuucaucgauaagccccugccugaccagaccgacaacgacaauugguggacaggauggcggcagugggugccagccggaauuggaaucaccggcgugaucauugccgugaucgcucugcugugcaucugcaaguuucugcug

SEQ ID NO: 57 - protein, 683 aa, Artificial Sequence
  Synthetic polypeptide
METPAQLLFLLLLWLPDTTGLPILEIASNNQPQNVDSVCSGTLQKTEDVHLMGFTLSGQKVADSPLEASKRWAFRTGVPPKNVEYTEGEEAKTCYNISVTDPSGKSLLLDPPTNIRDYPKCKTIHHIQGQNPHAQGIALHLWGAFFLYDRIASTTMYRGKVFTEGNIAAMIVNKTVHKMIFSRQGQGYRHMNLTSTNKYWTSSNGTQTNDTGCFGALQEYNSTKNQTCAPSKIPPPLPTARPEIKLTSTPTDATKLNTTDPSSDDEDLATSGSGSGEREPHTTSDAVTKQGLSSTMPPTPSPQPSTPQQGGNNTNHSQDAVTELDKNNTTAQPSMPPHNTTTISTNNTSKHNFSTLSAPLQNTTNDNTQSTITENEQTSAPSITTLPPTGNPTTAKSTSSKKGPATTAPNTTNEHFTSPPPTPSSTAQHLVYFRRKRSILWREGDMFPFLDGLINAPIDFDPVPNTKTIFDESSSSGASAEEDQHASPNISLTLSYFPNINENTAYSGENENDCDAELRIWSVQEDDLAAGLSWIPFFGPGIEGLYTAVLIKNQNNLVCRLRRLANQTAKSLELLLRVTTEERTFSLINRHAIDFLLTRWGGTCKVLGPDCCIGIEDLSKNISEQIDQIKKDEQKEGTGWGLGGKWWTSDWGVLTNLGILLLLSIAVLIALSCICRIFTKYIG

SEQ ID NO: 58 - protein, 663 aa, Artificial Sequence
  Synthetic polypeptide
LPILEIASNNQPQNVDSVCSGTLQKTEDVHLMGFTLSGQKVADSPLEASKRWAFRTGVPPKNVEYTEGEEAKTCYNISVTDPSGKSLLLDPPTNIRDYPKCKTIHHIQGQNPHAQGIALHLWGAFFLYDRIASTTMYRGKVFTEGNIAAMIVNKTVHKMIFSRQGQGYRHMNLTSTNKYWTSSNGTQTNDTGCFGALQEYNSTKNQTCAPSKIPPPLPTARPEIKLTSTPTDATKLNTTDPSSDDEDLATSGSGSGEREPHTTSDAVTKQGLSSTMPPTPSPQPSTPQQGGNNTNHSQDAVTELDKNNTTAQPSMPPHNTTTISTNNTSKHNFSTLSAPLQNTTNDNTQSTITENEQTSAPSITTLPPTGNPTTAKSTSSKKGPATTAPNTTNEHFTSPPPTPSSTAQHLVYFRRKRSILWREGDMFPFLDGLINAPIDFDPVPNTKTIFDESSSSGASAEEDQHASPNISLTLSYFPNINENTAYSGENENDCDAELRIWSVQEDDLAAGLSWIPFFGPGIEGLYTAVLIKNQNNLVCRLRRLANQTAKSLELLLRVTTEERTFSLINRHAIDFLLTRWGGTCKVLGPDCCIGIEDLSKNISEQIDQIKKDEQKEGTGWGLGGKWWTSDWGVLTNLGILLLLSIAVLIALSCICRIFTKYIG

SEQ ID NO: 59 - protein, 683 aa, Artificial Sequence
  Synthetic polypeptide
METPAQLLFLLLLWLPDTTGLPVLEIASNSQPQDVDSVCSGTLQKTEDVHLMGFTLSGQKVADSPLEASKRWAFRTGVPPKNVEYTEGEEAKTCYNISVTDPSGKSLLLDPPSNIRDYPKCKTVHHIQGQNPHAQGIALHLWGAFFLYDRVASTTMYRGKVFTEGNIAAMIVNKTVHRMIFSRQGQGYRHMNLTSTNKYWTSSNETQRNDTGCFGILQEYNSTNNQTCPPSLKPPSLPTVTPSIHSTNTQINTAKSGTMNPSSDDEDLMISGSGSGEQGPHTTLNVVTEQKQSSTILSTPSLHPSTSQHEQNSTNPSRHAVTEHNGTDPTTQPATLLNNTNTTPTYNTLKYNLSTPSPPTRNITNNDTQRELAESEQTNAQLNTTLDPTENPTTGQDTNSTTNIIMTTSDITSKHPTNSSPDSSPTTRPPIYFRKKRSIFWKEGDIFPFLDGLINTEIDFDPIPNTETIFDESPSFNTSTNEEQHTPPNISLTFSYFPDKNGDTAYSGENENDCDAELRIWSVQEDDLAAGLSWIPFFGPGIEGLYTAGLIKNQNNLVCRLRRLANQTAKSLELLLRVTTEERTFSLINRHAIDFLLTRWGGTCKVLGPDCCIGIEDLSKNISEQIDKIRKDEQKEETGWGLGGKWWTSDWGVLTNLGILLLLSIAVLIALSCICRIFTKYIG

SEQ ID NO: 60 - protein, 663 aa, Artificial Sequence
  Synthetic polypeptide
LPVLEIASNSQPQDVDSVCSGTLQKTEDVHLMGFTLSGQKVADSPLEASKRWAFRTGVPPKNVEYTEGEEAKTCYNISVTDPSGKSLLLDPPSNIRDYPKCKTVHHIQGQNPHAQGIALHLWGAFFLYDRVASTTMYRGKVFTEGNIAAMIVNKTVHRMIFSRQGQGYRHMNLTSTNKYWTSSNETQRNDTGCFGILQEYNSTNNQTCPPSLKPPSLPTVTPSIHSTNTQINTAKSGTMNPSSDDEDLMISGSGSGEQGPHTTLNVVTEQKQSSTILSTPSLHPSTSQHEQNSTNPSRHAVTEHNGTDPTTQPATLLNNTNTTPTYNTLKYNLSTPSPPTRNITNNDTQRELAESEQTNAQLNTTLDPTENPTTGQDTNSTTNIIMTTSDITSKHPTNSSPDSSPTTRPPIYFRKKRSIFWKEGDIFPFLDGLINTEIDFDPIPNTETIFDESPSFNTSTNEEQHTPPNISLTFSYFPDKNGDTAYSGENENDCDAELRIWSVQEDDLAAGLSWIPFFGPGIEGLYTAGLIKNQNNLVCRLRRLANQTAKSLELLLRVTTEERTFSLINRHAIDFLLTRWGGTCKVLGPDCCIGIEDLSKNISEQIDKIRKDEQKEETGWGLGGKWWTSDWGVLTNLGILLLLSIAVLIALSCICRIFTKYIG

SEQ ID NO: 61 - protein, 683 aa, Artificial Sequence
  Synthetic polypeptide
METPAQLLFLLLLWLPDTTGLPILEIASNDQPQNVDSVCSGTLQKTEDVHLMGFTLSGQKVADSPLEASKRWAFRTGVPPKNVEYTEGEEAKTCYNISVTDPSGKSLLLDPPTNVRDYPKCKTIHHIQGQNPHAQGIALHLWGAFFLYDRIASTTMYRGKVFTEGNIAAMIVNKTVHKMIFSRQGQGYRHMNLTSTNKYWTSSNGTQTNDTGCFGTLQEYNSTKNQTCTPSKTPPSPPTAHPEIKPTSTPTDATRLNTTNPNSDDEDLTTSGSGSGEQEPDTTSDAVTKQGLSSTMPPTPSPQPGTPQQGGNNTNHSQDAATELDNSNTTAQPPTPSHNTTTISTNNTSKHNLSTLSELPQNTTNPNTQSMATENEKTSASPKTTLPPTESPTTEKSTNNTKSPTTMEPNTTNGHFTSPSSTPNSTTQHLIYFRRKRSILWREGDMFPFLDGLINAPIDFDPVPNTKTIFDESSSSGASAEEDQHASSNISLTLSYLPHTSENTAYSGENENDCDAELRIWSVQEDDLAAGLSWIPFFGPGIEGLYTAGLIKNQNNLVCRLRRLANQTAKSLELLLRVTTEERTFSLINRHAIDFLLTRWGGTCKVLGPDCCIGIEDLSRNISEQIDQIKKDEQKEGTGWGLGGKWWTSDWGVLTNLGILLLLSIAVLIALSCICRIFTKYIG

SEQ ID NO: 62 - protein, 663 aa, Artificial Sequence
  Synthetic polypeptide
LPILEIASNDQPQNVDSVCSGTLQKTEDVHLMGFTLSGQKVADSPLEASKRWAFRTGVPPKNVEYTEGEEAKTCYNISVTDPSGKSLLLDPPTNVRDYPKCKTIHHIQGQNPHAQGIALHLWGAFFLYDRIASTTMYRGKVFTEGNIAAMIVNKTVHKMIFSRQGQGYRHMNLTSTNKYWTSSNGTQTNDTGCFGTLQEYNSTKNQTCTPSKTPPSPPTAHPEIKPTSTPTDATRLNTTNPNSDDEDLTTSGSGSGEQEPDTTSDAVTKQGLSSTMPPTPSPQPGTPQQGGNNTNHSQDAATELDNSNTTAQPPTPSHNTTTISTNNTSKHNLSTLSELPQNTTNPNTQSMATENEKTSASPKTTLPPTESPTTEKSTNNTKSPTTMEPNTTNGHFTSPSSTPNSTTQHLIYFRRKRSILWREGDMFPFLDGLINAPIDFDPVPNTKTIFDESSSSGASAEEDQHASSNISLTLSYLPHTSENTAYSGENENDCDAELRIWSVQEDDLAAGLSWIPFFGPGIEGLYTAGLIKNQNNLVCRLRRLANQTAKSLELLLRVTTEERTFSLINRHAIDFLLTRWGGTCKVLGPDCCIGIEDLSRNISEQIDQIKKDEQKEGTGWGLGGKWWTSDWGVLTNLGILLLLSIAVLIALSCICRIFTKYIG

SEQ ID NO: 63 - protein, 681 aa, Artificial Sequence
  Synthetic polypeptide
MKTTCFLISLILIQGTKNLPILEIASNNQPQNVDSVCSGTLQKTEDVHLMGFTLSGQKVADSPLEASKRWAFRTGVPPKNVEYTEGEEAKTCYNISVTDPSGKSLLLDPPTNIRDYPKCKTIHHIQGQNPHAQGIALHLWGAFFLYDRIASTTMYRGKVFTEGNIAAMIVNKTVHKMIFSRQGQGYRHMNLTSTNKYWTSSNGTQTNDTGCFGALQEYNSTKNQTCAPSKIPPPLPTARPEIKLTSTPTDATKLNTTDPSSDDEDLATSGSGSGEREPHTTSDAVTKQGLSSTMPPTPSPQPSTPQQGGNNTNHSQDAVTELDKNNTTAQPSMPPHNTTTISTNNTSKHNFSTLSAPLQNTTNDNTQSTITENEQTSAPSITTLPPTGNPTTAKSTSSKKGPATTAPNTTNEHFTSPPPTPSSTAQHLVYFRRKRSILWREGDMFPFLDGLINAPIDFDPVPNTKTIFDESSSSGASAEEDQHASPNISLTLSYFPNINENTAYSGENENDCDAELRIWSVQEDDLAAGLSWIPFFGPGIEGLYTAVLIKNQNNLVCRLRRLANQTAKSLELLLRVTTEERTFSLINRHAIDFLLTRWGGTCKVLGPDCCIGIEDLSKNISEQIDQIKKDEQKEGTGWGLGGKWWTSDWGVLTNLGILLLLSIAVLIALSCICRIFTKYIG

SEQ ID NO: 64 - protein, 681 aa, Artificial Sequence
  Synthetic polypeptide
MRTTCLFISLILIQGIKTLPILEIASNDQPQNVDSVCSGTLQKTEDVHLMGFTLSGQKVADSPLEASKRWAFRTGVPPKNVEYTEGEEAKTCYNISVTDPSGKSLLLDPPTNVRDYPKCKTIHHIQGQNPHAQGIALHLWGAFFLYDRIASTTMYRGKVFTEGNIAAMIVNKTVHKMIFSRQGQGYRHMNLTSTNKYWTSSNGTQTNDTGCFGTLHEYNSTKNQTCAPSKTPPPPPTARPEIKPTSTPTDATRLNTTNPNSDDEDLTTSGSGSGEQELYTTSDAVTKQGLSSTMPPTPSPQPGTPQQGGNNTNHSQDATTELDNTNTTAQPPTPSHNTTTISTNNTSKHNLSTLSAPPQNTTNPNTQSMATENEKTSAPPKATLPPTENPTTEKSTNNTKSPTTMEPNTTNGHFTSPSSTPNSTTQHLIYFRRKRSILWREGDMFPFLDGLINAPIDFDPVPNTKTIFDESSSSGASTEEDQHASSNISLTLSYLPHTSGNTAYSGENENDCDAELRIWSVQEDDLAAGLSWIPFFGPGIEGLYTAGLIKNQNNLVCRLRRLANQTAKSLELLLRVTTEERTFSLINRHAIDFLLTRWGGTCKVLGPDCCIGIEDLSRNISEQIDQIKKDEQKEGTGWGLGGKWWTSDWGVLTNLGILLLLSIAVLIALSCICRIFTKYIG

SEQ ID NO: 65 - protein, 681 aa, Artificial Sequence
  Synthetic polypeptide
MKTTCFLISLILIQGTKNLPILEIASNNQPQNVDSVCSGTLQKTEDVHLMGFTLSGQKVADSPLEASKRWAFRTGVPPKNVEYTEGEEAKTCYNISVTDPSGKSLLLDPPTNIRDYPKCKTIHHIQGQNPHAQGIALHLWGAFFLYDRIASTTMYRGKVFTEGNIAAMIVNKTVHKMIFSRQGQGYRHMNLTSTNKYWTSSNGTQTNDTGCFGALQEYNSTKNQTCAPSKIPPPLPTARPEIKLTSTPTDATKLNTTDPSSDDEDLATSGSGSGEREPHTTSDAVTKQGLSSTMPPTPSPQPSTPQQGGNNTNHSQDAVTELDKNNTTAQPSMPPHNTTTISTNNTSKHNFSTLSAPLQNTTNDNTQSTITENEQTSAPSITTLPPTGNPTTAKSTSSKKGPATTAPNTTNEHFTSPPPTPSSTAQHLVYFRRKRSILWREGDMFPFLDGLINAPIDFDPVPNTKTIFDESSSSGASAEEDQHASPNISLTLSYFPNINENTAYSGENENDCDAELRIWSVQEDDLAAGLSWIPFFGPGIEGLYTAGLIKNQNNLVCRLRRLANQTAKSLELLLRVTTEERTFSLINRHAIDFLLTRWGGTCKVLGPDCCIGIEDLSKNISEQIDQIKKDEQKEGTGWGLGGKWWTSDWGVLTNLGILLLLSIAVLIALSCICRIFTKYIG

SEQ ID NO: 66 - protein, 681 aa, Artificial Sequence; identical to SEQ ID NO: 65
  Synthetic polypeptide

SEQ ID NO: 67 - protein, 681 aa, Artificial Sequence
  Synthetic polypeptide
MKTTCLFISLILIQGIKTLPILEIASNNQPQNVDSVCSGTLQKTEDVHLMGFTLSGQKVADSPLEASKRWAFRTGVPPKNVEYTEGEEAKTCYNISVTDPSGKSLLLDPPTNIRDYPKCKTIHHIQGQNPHAQGIALHLWGAFFLYDRIASTTMYRGRVFTEGNIAAMIVNKTVHKMIFSRQGQGYRHMNLTSTNKYWTSNNGTQTNDTGCFGALQEYNSTKNQTCAPSKIPSPLPTARPEIKPTSTPTDATTLNTTDPNNDDEDLITSGSGSGEQEPYTTSDAVTKQGLSSTMPPTPSPQPSTPQQEGNNTDHSQGTVTEPNKTNTTAQPSMPPHNTTAISTNNTSKNNFSTLSVSLQNTTNYDTQSTATENEQTSAPSKTTLPPTGNLTTAKSTNNTKGPTTTAPNMTNGHLTSPSPTPNPTTQHLVYFRKKRSILWREGDMFPFLDGLINAPIDFDPVPNTKTIFDESSSSGASAEEDQHASPNISLTLSYFPNINENTAYSGENENDCDAELRIWSVQEDDLAAGLSWIPFFGPGIEGLYTAGLIKNQNNLVCRLRRLANQTAKSLELLLRVTTEERTFSLINRHAIDFLLTRWGGTCKVLGPDCCIGIEDLSRNISEQIDQIKKDEQKEGTGWGLGGKWWTSDWGVLTNLGILLLLSIAVLIALSCICRIFTKYIG

SEQ ID NO: 68 - protein, 681 aa, Artificial Sequence; identical to SEQ ID NO: 63
  Synthetic polypeptide

SEQ ID NO: 69 - protein, 654 aa, Artificial Sequence
  Synthetic polypeptide
DQPQNVDSVCSGTLQKTEDVHLMGFTLSGQKVADSPLEASKRWAFRTGVPPKNVEYTEGEEAKTCYNISVTDPSGKSLLLDPPTNVRDYPKCKTIHHIQGQNPHAQGIALHLWGAFFLYDRIASTTMYRGKVFTEGNIAAMIVNKTVHKMIFSRQGQGYRHMNLTSTNKYWTSSNGTQTNDTGCLGTLHEYNSTKNQTCAPSKTPPPPPTARPEIKPTSTPTDATRLNTTNPNSDDEDLTTSGSGSGEQELYTTSDAVTKQGLSSTMPPTPSPQPGTPQQGGNNTNHSQDATTELDNTNTTAQPPTPSHNTTTISTNNTSKHNLSTLSAPPQNTTNPNTQSMVTENEKTSAPPKATLPPTENPTTEKSTNNTKSPTTLEPNTTNGHFTSPSSTPNSTTQHLIYFRRKRSILWREGDMFPFLDGLINAPIDFDPVPNTKTIFDESSSSGASTEEDQHASSNISLTLSYLPHTSGNTAYSGENENDCDAELRIWSVQEDDLAAGLSWIPLFGPGIEGLYTAGLIKNQNNLVCRLRRLANQTAKSLELLLRVTTEERTFSLINRHAIDFLLTRWGGTCKVLGPDCCIGIEDLSRNISEQIDQIKKDEQKEGTGWGLGGKWWTSDWGVLTNLGILLLLSIAVLIALSCICRIFTKYIG

SEQ ID NO: 70 - protein, 654 aa, Artificial Sequence
  Synthetic polypeptide
NQPQNVDSVCSGTLQKTEDVHLMGFTLSGQKVADSPLEASKRWAFRTGVPPKNVEYTEGEEAKTCYNISVTDPSGKSLLLDPPTNIRDYPKCKTIHHIQGQNPHAQGIALHLWGAFFLYDRIASTTMYRGRVFTEGNIAAMIVNKTVHKMIFSRQGQGYRHMNLTSTNKYWTSNNGTQTNDTGCFGALQEYNSTKNQTCAPSKIPSPLPTARPEIKPTSTPTDATTLNTTDPNNDDEDLITSGSGSGEQEPYTTSDAVTKQGLSSTMPPTPSPQPSTPQQEGNNTDHSQGTVTEPNKTNTTAQPSMPPHNTTAISTNNTSKNNFSTLSVSLQNTTNYDTQSTATENEQTSAPSKTTLPPTGNLTTAKSTNNTKGPTTTAPNMTNGHLTSPSPTPNPTTQHLVYFRKKRSILWREGDMFPFLDGLINAPIDFDPVPNTKTIFDESSSSGASAEEDQHASPNISLTLSYFPNINENTAYSGENENDCDAELRIWSVQEDDLAAGLSWIPFFGPGIEGLYTAGLIKNQNNLVCRLRRLANQTAKSLELLLRVTTEERTFSLINRHAIDFLLTRWGGTCKVLGPDCCIGIEDLSRNISEQIDQIKKDEQKEGTGWGLGGKWWTSDWGVLTNLGILLLLSIAVLIALSCICRIFTKYIG

SEQ ID NO: 71 - protein, 654 aa, Artificial Sequence
  Synthetic polypeptide
SQPQDVDSVCSGTLQKTEDVHLMGFTLSGQKVADSPLEASKRWAFRTGVPPKNVEYTEGEEAKTCYNISVTDPSGKSLLLDPPSNIRDYPKCKTVHHIQGQNPHAQGIALHLWGAFFLYDRVASTTMYRGKVFTEGNIAAMIVNKTVHRMIFSRQGQGYRHMNLTSTNKYWTSSNETQRNDTGCFGILQEYNSTNNQTCPPSLKPPSLPTVTPSIHSTNTQINTAKSGTMNPSSDDEDLMISGSGSGEQGPHTTLNVVTEQKQSSTILSTPSLHPSTSQHEQNSTNPSRHAVTEHNGTDPTTQPATLLNNTNTTPTYNTLKYNLSTPSPPTRNITNNDTQRELAESEQTNAQLNTTLDPTENPTTGQDTNSTTNIIMTTSDITSKHPTNSSPDSSPTTRPPIYFRKKRSIFWKEGDIFPFLDGLINTEIDFDPIPNTETIFDESPSFNTSTNEEQHTPPNISLTFSYFPDKNGDTAYSGENENDCDAELRIWSVQEDDLAAGLSWIPFFGPGIEGLYTAGLIKNQNNLVCRLRRLANQTAKSLELLLRVTTEERTFSLINRHAIDFLLTRWGGTCKVLGPDCCIGIEDLSKNISEQIDKIRKDEQKEETGWGLGGKWWTSDWGVLTNLGILLLLSIAVLIALSCICRIFTKYIG

SEQ ID NO: 72 - protein, 681 aa, Artificial Sequence; identical to SEQ ID NO: 67
  Synthetic polypeptide

SEQ ID NO: 73 - protein, 681 aa, Artificial Sequence; identical to SEQ ID NO: 63
  Synthetic polypeptide

SEQ ID NO: 74 - protein, 681 aa, Artificial Sequence; identical to SEQ ID NO: 67
  Synthetic polypeptide

SEQ ID NO: 75 - protein, 681 aa, Artificial Sequence; identical to SEQ ID NO: 67
  Synthetic polypeptide

SEQ ID NO: 76 - protein, 681 aa, Artificial Sequence; identical to SEQ ID NO: 67
  Synthetic polypeptide

SEQ ID NO: 77 - protein, 681 aa, Artificial Sequence
  Synthetic polypeptide
MKTTCLFISLILIQGIKTLPILEIASNNQPQNVDSVCSGTLQKTEDVHLMGFTLSGQKVADSPLEASKRWAFRTGVPPKNVEYTEGEEAKTCYNISVTDPSGKSLLLDPPTNIRDYPKCKTIHHIQGQNPHAQGIALHLWGAFFLYDRIASTTMYRGRVFTEGNIAAMIVNKTVHKMIFSRQGQGYRHMNLTSTNKYWTSNNGTQTNDTGCFGALQEYNSTKNQTCAPSKIPSPLPTARPEIKPTSTPTDATTLNTTDPNNDDEDLITSGSGSGEQEPYTTSDAVTKQGLSSTMPPTPSPQPSTPQQEGNNTDHSQGTVTEPNKTNTTAQPSMPPHNTTAISTNNTSKNNFSTLSVSLQNTTNYDTQSTATENEQTSAPSKTTLPPTGNLTTAKSTNNTKGPTTTAPNMTNGHLTSPSPTPNPTTQHLVYFRKKRSILWREGDMPPFLDGLINAPIDFDPVPNTKTIFDESSSSGASAEEDQHASPNISLTLSYFPNINENTAYSGENENDCDAELRIWSVQEDDLAAGLSWIPFFGPGIEGLYTAGLIKNQNNLVCRLRRLANQTAKSLELLLRVTTEERTFSLINRHAIDFLLTRWGGTCKVLGPDCCIGIEDLSRNISEQIDQIKKDEQKEGTGWGLGGKWWTSDWGVLTNLGILLLLSIAVLIALSCICRIFTKYIG

SEQ ID NO: 78 - protein, 681 aa, Artificial Sequence
  Synthetic polypeptide
MKTIYFLISLILIQSIKTLPVLEIASNSQPQDVDSVCSGTLQKTEDVHLMGFTLSGQKVADSPLEASKRWAFRTGVPPKNVEYTEGEEAKTCYNISVTDPSGKSLLLDPPSNIRDYPKCKTVHHIQGQNPHAQGIALHLWGAFFLYDRVASTTMYRGKVFTEGNIAAMIVNKTVHRMIFSRQGQGYRHMNLTSTNKYWTSSNETQRNDTGCFGILQEYNSTNNQTCPPSLKPPSLPTVTPSIHSTNTQINTAKSGTMNPSSDDEDLMISGSGSGEQGPHTTLHVVTEQKQSSTILSTPSLHPSTSQHEQNSTNPSRHAVTEHNGTDPTTQPATLLNNTNTTPTYNTLKYNLSTPSPPTRNITNNDTQRELAESEQTNAQLNTTLDPTENPTTAQDTNSTTNIIMTTSDITSKHPTNSSPDSSPTTRPPIYFRKKRSIFWKEGDIFPFLDGLINTEIDFDPIPNTETIFDESPSFNTSTNEEQHTPPNISLTFSYFPDKNGDTAYSGENENDCDAELRIWSVQEDDLAAGLSWIPFFGPGIEGLYTAGLIKNQNNLVCRLRRLANQTAKSLELLLRVTTEERTFSLINRHAIDFLLTRWGGTCKVLGPDCCIGIEDLSKNISEQIDKIRKDEQKEETGWGLGGKWWTSDWGVLTNLGILLLLSIAVLIALSCICRIFTKYIG

SEQ ID NO: 79 - protein, 681 aa, Artificial Sequence
  Synthetic polypeptide
MKTIYFLISLILIQSIKTLPVLEIASNSQPQDVDSVCSGTLQKTEDVHLMGFTLSGQKVADSPLEASKRWAFRTGVPPKNVEYTEGEEAKTCYNISVTDPSGKSLLLDPPSNIRDYPKCKTVHHIQGQNPHAQGIALHLWGAFFLYDRVASTTMYRGKVFTEGNIAAMIVNKTVHRMIFSRQGQGYRHMNLTSTNKYWTSSNETQRNDTGCFGILQEYNSTNNQTCPPSLKPPSLPTVTPSIHSTNTQINTAKSGTMNPSSDDEDLMISGSGSGEQGPHTTLNVVTEQKQSSTILSTPSLHPSTSQHEQNSTNPSRHAVTEHNGTDPTTQPATLLNNTNTTPTYNTLKYNLSTPSPPTRNITNNDTQRELAESEQTNAQLNTTLDPTENPTTGQDTNSTTNIIMTTSDITSKHPTNSSPDSSPTTRPPIYFRKKRSIFWKEGDIFPFLDGLINTEIDFDPIPNTETIFDESPSFNTSTNEEQHTPPNISLTFSYFPDKNGDTAYSGENENDCDAELRIWSVQEDDLAAGLSWIPFFGPGIEGLYTAGLIKNQNNLVCRLRRLANQTAKSLELLLRVTTEERTFSLINRHAIDFLLTRWGGTCKVLGPDCCIGIEDLSKNISEQIDKIRKDEQKEETGWGLGGKWWTSDWGVLTNLGILLLLSIAVLIALSCICRIFTKYIG

SEQ ID NO: 80 - protein, 681 aa, Artificial Sequence
  Synthetic polypeptide
MKTIYFLISLILIQSIKTLPVLEIASNSQPQDVDSVCSGTLQKTEDVHLMGFTLSGQKVADSPLEASKRWAFRTGVPPKNVEYTEGEEAKTCYNISVTDPSGKSLLLDPPSNIRDYPKCKTVHHIQGQNPHAQGIALHLWGAFFLYDRVASTTMYRGKVFTEGNIAAMIVNKTVHRMIFSRQGQGYRHMNLTSTNKYWTSSNETQRNDTGCFGILQEYNSTNNQTCPPSLKPPSLPTVTPSIHSTNTQINTAKSGTMNPSSDDEDLMISGSGSGEQGPHTTLNVVTEQKQSSTILSTPSLHPSTSQHEQNSTNPSRHAVTEHNGTDPTTQPATLLNNTNTTPTYNTLKYNLSTPSPPTRNITNNDTQRELAESEQTNAQLNTTLDPTENPTTAQDTNSTTNIIMTTSDITSKHPTNSSPDSSPTTRPPIYFRKKRSIFWKEGDIFPFLDGLINTEIDFDPIPNTETIFDESPSFNTSTNEEQHTPPNISLTFSYFPDKNGDTAYSGENENDCDAELRIWSVQEDDLAAGLSWIPFFGPGIEGLYTAGLIKNQNNLVCRLRRLANQTAKSLELLLRVTTEERTFSLINRHAIDFLLTRWGGTCKVLGPDCCIGIEDLSKNISEQIDKIRKDEQKEETGWGLGGKWWTSDWGVLTNLGILLLLSIAVLIALSCICRIFTKYIG

SEQ ID NO: 81 - protein, 681 aa, Artificial Sequence; identical to SEQ ID NO: 80
  Synthetic polypeptide

SEQ ID NO: 82 - protein, 681 aa, Artificial Sequence; identical to SEQ ID NO: 80
  Synthetic polypeptide

SEQ ID NO: 83 - protein, 681 aa, Artificial Sequence; identical to SEQ ID NO: 79
  Synthetic polypeptide

SEQ ID NO: 84 - protein, 681 aa, Artificial Sequence; identical to SEQ ID NO: 80
  Synthetic polypeptide

SEQ ID NO: 85 - protein, 681 aa, Artificial Sequence
  Synthetic polypeptide
MRTTCFFISLILIQGIKTLPILEIASNDQPQNVDSVCSGTLQKTEDVHLMGFTLSGQKVADSPLEASKRWAFRTGVPPKNVEYTEGEEAKTCYNISVTDPSGKSLLLDPPTNVRDYPKCKTIHHIQGQNPHAQGIALHLWGAFFLYDRIASTTMYRGKVFTEGNIAAMIVNKTVHKMIFSRQGQGYRHMNLTSTNKYWTSSNGTQTNDTGCFGTLQEYNSTKNQTCAPSKTPPPPPTAHPEVKPTRTPTDATRLNTTNPNSDDEDLTTSGSGSGEQEPYTTSDAVTKQGLSSTMPPTPSPQPGTPQQGGNNTNHSQDAATKLDNTNTAAQPPTPSHNTTTISTNNTSKHNLSTLSEPPQNTTNPNTQSMVTENEKTSAPPKTTLPPTESPTTEKSTNNTKSPTTMEPNTTNGHFTSPSSTPNSTTQHLIYFRRKRSILWREGDMFPFLDGLINAPIDFDPVPNAKTIFDESSSSGASAEEDQHAFSNISLTLSYLPHTSENTAYSGENENDCDAELRIWSVQEDDLAAGLSWIPFFGPGIEGLYTAGLIKNQNNLVCRLRRLANQTAKSLELLLRVTTEERTFSLINRHAIDFLLTRWGGTCKVLGPDCCIGIEDLSRNISEQIDQIKKDEQKEGTGWGLGGKWWTSDWGVLTNLGILLLLSIAVLIALSCICRIFTKYIG

SEQ ID NO: 86 - protein, 681 aa, Artificial Sequence
  Synthetic polypeptide
MRTTCFFISLILIQGIKTLPILEIASNDQPQNVDSVCSGTLQKTEDVHLMGFTLSGQKVADSPLEASKRWAFRTGVPPKNVEYTEGEEAKTCYNISVTDPSGKSLLLDPPTNVRDYPKCKTIHHIQGQNPHAQGIALHLWGAFFLYDRIASTTMYRGKVFTEGNIAAMIVNKTVHKMIFSRQGQGYRHMNLTSTNKYWTSSNGTQTNDTGCFGTLQEYNSTKNQTCAPSKTPPPPPTARPEIKPTSTPTDATRLNTTNPNSDDEDLTTSGSGSGEQEPYTTSDAVTKQGLSSTMPPTPSPQPGTPQQGGNNTNHSQDAATELDNTNTTAQLPTPSHNTTTISTNNTSKHNLSTLSEPPQNTTNPNTQSMATEKEKTSAPPKTTLPPTESPTTEKSTNNTKSPTTMEPSTTNGHFTSPSSTPNSTTQHLIYFRRKRSILWREGDMFPFLDGLINAPIDFDPVPNTKTIFDESSSSGASAEEDQHASSNISLTLSYLPHTSENTAYSGENENDCDAELRIWSVQEDDLAAGLSWIPFFGPGIEGLYTAGLIKNQNNLVCRLRRLANQTAKSLELLLRVTTEERTFSLINRHAIDFLLTRWGGTCKVLGPDCCIGIEDLSRNISEQIDQIKKDEQKEGTGWGLGGKWWTSDWGVLTNLGILLLLSIAVLIALSCICRIFTKYIG

SEQ ID NO: 87 - protein, 681 aa, Artificial Sequence
  Synthetic polypeptide
MRTTCFFISLILIQGIKTLPILEIASNDQPQNVDSVCSGTLQKTEDVHLMGFTLSGQKVADSPLEASKRWAFRTGVPPKNVEYTEGEEAKTCYNISVTDPSGKSLLLDPPTNVRDYPKCKTIHHIQGQNPHAQGIALHLWGAFFLYDRIASTTMYRGKVFTEGNIAAMIVNKTVHKMIFSRQGQGYRHMNLTSTNKYWTSSNGTQTNDTGCFGTLQEYNSTKNQTCAPSKTPPPPPTARPEIKPTSTPTDATRLNTTNPNSDDEDLTTSGSGSGEQEPYTTSDAVTKQGLSSTMPPTPSPQPGTPQQGGNNTNHSQDAATELDNTNTTAQLPTPSHNTTTISTNNTSKHNLSTLSEPPQNTTNPNTQSMATENEKTSAPPKTTLPPIESPTTEKSTNNTKSPTTMEPNTTNGHFTSPSSTPNSTTQHLIYFRRKRSILWREGDMFPFLDGLINAPIDFDPVPNTKTIFDESSSSGASAEEDQHASSNISLTLSYLPHTSENTAYSGENENDCDAELRIWSVQEDDLAAGLSWIPFFGPGIEGLYTAGLIKNQNNLVCRLRRLANQTAKSLELLLRVTTEERTFSLINRHAIDFLLTRWGGTCKVLGPDCCIGIEDLSRNISEQIDQIKKDEQKEGTGWGLGGKWWTSDWGVLTNLGILLLLSIAVLIALSCICRIFTKYIG

SEQ ID NO: 88 - protein, 681 aa, Artificial Sequence
  Synthetic polypeptide
MKTTCLFIGLILIQRIKTLPILEIASNNQPQNMDSVCSGTLQKTEDVHLMGFTLSGQKVADSPLEASKRWAFRTGVPPKNVEYTEGEEAKTCYNISVTDPSGRSLLLDPPTNIRDYPKCKTIHHIQGQNPHAQGIALHLWGAFFLYDRIASTTMYRGRVFTEGNIAAMIVNKTVHKMIFSRQGQGYRHMNLTSTNKYWTSNNGTQTNGTGCFGALQEYNSTKNQTCAPSKIPSPLPTTRPEIKPTSTPTDATALNITDPNSDDEDLITSGSGSEEQEPYTTSDAVTEQGLSSTMPPTPSPQPSTPQQEGNNTDHSQGAVTGPNKTNATAQPSMPPHNTTAISTNNTSKSNFSTLSAPLQNTTNYDTQSTATENEQTSAPLKTTLPPTGNLTTAKSTNNTKGPTTTAPNMTNEHLTSPSPTPNPTTQHLVYFRKKRSILWREGDMFPFLDGLINAPIDFDPVPNTKTIFDESSSSGASAEEDQHASPNISLTLSYFPNINENTAYSGENENDCDAELRIWSVQEDDLAAGLSWIPFFGPGIEGLYTAGLIKNQNNLVCRLRRLANQTAKSLELLLRVTTEERTFSLINRHAIDFLLTRWGGTCKVLGPDCCIGIEDLSKNISEQIDQIKKDEQKEGTGWGLGGKWWTSDWGVLTNLGILLLLSIAVLIALSCICRIFTKYIG

SEQ ID NO: 89 - protein, 681 aa, Artificial Sequence; identical to SEQ ID NO: 85
  Synthetic polypeptide

SEQ ID NO: 90 - protein, 681 aa, Artificial Sequence; identical to SEQ ID NO: 85
  Synthetic polypeptide

SEQ ID NO: 91 - protein, 681 aa, Artificial Sequence; identical to SEQ ID NO: 87
  Synthetic polypeptide

SEQ ID NO: 92 - protein, 681 aa, Artificial Sequence
  Synthetic polypeptide
MKTIYFLISLILIQSIKTLPVLEIASNSQPQDVDSVCSGTLQKTEDVHLMGFTLSGQKVADSPLEASKRWAFRTGVPPKNVEYTEGEEAKTCYNISVTDPSGKSLLLDPPSNIRDYPKCKTVHHIQGQNPHAQGIALHLWGAFFLYDRVASTTMYRGKVFTEGNIAAMIVNKTVHRMIFSRQGQGYRHMNLTSTNKYWTSSNETRRNDTGCFGILQEYNSTNNQTCSPSLKPPSLPTVTPSIHSTNTQINTAKSGTMNPSSDDEDLMISGSGSGEQGPHTTLNVVTEQKQSSTILSTPSLHPSTSQHEQNSTNPSRHAVTEHNGTDPTTQPATLLNNTNATPTYNTLKYNLSTPSPPTRNITNNDTQRELAESEQANAQLNTTLDPTENPTTAQDTNSTTNIVMTTSDITSKHPTNSSPDSSPTTRPPIYFRKKRSIFWKEGDIFPFLDGLINTEIDFDPIPNTETIFDESPSFNTSTNEEQHTFPNISLTFSYFPDKNGDTAYSGENEDDCDAELRIWSVQEDDLAAGLSWIPFFGPGIEGLYTAGLIKNQNNLVCRLRRLANQTAKSLELLLRVTTEERTFSLINRHAIDFLLTRWGGTCKVLGPDCCIGIEDLSKNISEQIDKIRKDEQKEETGWGLGGKWWTSDWGVLTNLGILLLLSIAVLIALSCICRIFTKYIG

SEQ ID NO: 93 - protein, 681 aa, Artificial Sequence
  Synthetic polypeptide
MWTTCFFISLILIQGIKTLPILEIASNDQPQNVDSVCSGTLQKTEDVHLMGFTLSGQKVADSPLEASKRWAFRTGVPPKNVEYTEGEEAKTCYNISVTDPSGKSLLLDPPTNVRDYPKCKTIHHIQGQNPHAQGIALHLWGAFFLYDRIASTTMYRGKVFTEGNIAAMIVNKTVHKMIFSRQGQGYRHMNLTSTNKYWTSSNGTQTNDTGCFGTLQEYNSTKNQTCAPSKTPPPPPTAHPEIKPTSTPTDATRLNTTNPNSDDEDLTTSGSGSGEQEPYTTSDAVTKQGLSSTMPPTPSPQPGTPQQGGNNTNHSQDAATELDNTNTTAQPPMPSHNTTTISTNNTSKHNLSTLSEPPQNTTNPNTQSMATENEKTSAPPKTTLPPTESPTTEKSTNNTKSPTTMEPNTTNGHFTSPSSTSNSTTQHLIYFRRKRSILWREGDMFPFLDGLINAPIDFDPVPNTKTIFDESSSSGASAEEDQHASSNISLTLSYLPHTSENTAYSGENENDCDAELRIWSVQEDDLAAGLSWIPFFGPGIEGLYTAGLIKNQNNLVCRLRRLANQTAKSLELLLRVTTEERTFSLINRHAIDFLLTRWGGTCKVLGPDCCIGIEDLSRNISEQIDQIKKDEQKEGTGWGLGGKWWTSDWGVLTNLGILLLLSIAVLIALSCICRIFTKYIG

SEQ ID NO: 94 - protein, 681 aa, Artificial Sequence
  Synthetic polypeptide
MWTTCFFISLILIQGIKTLPILEIASNDQPQNVDSVCSGTLQKTEDVHLMGFTLSGQKVADSPLEASKRWAFRTGVPPKNVEYTEGEEAKTCYNISVTDPSGKSLLLDPPTNVRDYPKCKTIHHIQGQNPHAQGIALHLWGAFFLYDRIASTTMYRGKVFTEGNIAAMIVNKTVHKMIFSRQGQGYRHMNLTSTNKYWTSSNGTQTNDTGCFGTLREYNSMKNQTCAPSKTPPPPPTAHPEIKPTSTPTDATRLNTTNPNSDDEDLTTSGSGSGEQEPYTTSDEVTKQGLSSTMPPTPSPQPGTPQQGGNNTNHSQDAATELDNTNTTAQPPMPSHNTTTISTNNTSKHNLSTLSEPPQNTTNPNTQSMATENEKTSAPPKTTLPPTESPTTEKSTNNTKSPTTMEPNKTNGHFTSPSSTPNSTTQHLIYFRRKRSILWREGDMFPFLDGLINAPIDFDPVPNTKTIFDESSSSGASAEEDQHASSNISLTLSYLPHTSENTAYSGENENDCDAELRIWSVQEDDLAAGLSWIPFFGPGIEGLYTAGLIKNQNNLVCRLRRLANQTAKSLELLLRVTTEERTFSLINRHAIDFLLTRWGGTCKVLGPDCCIGIEDLSRNISEQIDQIKKDEQKEGTGWGLGGKWWTSDWGVLTNLGILLLLSIAVLIALSCICRIFTKYIG

SEQ ID NO: 95 - protein, 681 aa, Artificial Sequence
  Synthetic polypeptide
MWTTCFFISLILIQGIKTLPILEIASNDQPQNVDSVCSGTLQKTEDVHLMGFTLSGQKVADSPLEASKRWAFRTGVPPKNVEYTEGEEAKTCYNISVTDPSGKSLLLDPPTNVRDYPKCKTIHHIQGQNPHAQGIALHLWGAFFLYDRIASTTMYRGKVFTEGNIAAMIVNKTVHKMIFSRQGQGYRHMNLTSTNKYWTSSNGTQTNDTGCFGTLREYNSTKNQTCAPSKTPPPPPTAHPEIKPTSTPTDATRLNTTNPNSDDEDLTTSGSGSGEQEPYTTSDAVTKQGLSSTMPPTPSPQPGTPQQGGNNTNHSQDAATELDNTNTTAQPPMPSHNTTTISTNNTSKHNLSTLSEPPQNTTNPNTQSMATENEKTSAPPKTTLPPTESPTTEKSTNNTKSPTTMEPNKTNGHFTSPSSTPNSTTQHLIYFRRKRSILWREGDMFPFLDGLINAPIDFDPVPNTKTIFDESSSSGASAEEDQHASSNISLTLSYLPHTSENTAYSGENENDCDAELRIWSVQEDDLAAGLSWIPFFGPGIEGLYTAGLIKNQNNLVCRLRRLANQTAKSLELLLRVTTEERTFSLINRHAIDFLLTRWGGTCKVLGPDCCIGIEDLSRNISEQIDQIKKDEQKEGTGWGLGGKWWTSDWGVLTNLGILLLLSIAVLIALSCICRIFTKYIG

SEQ ID NO: 96 - protein, 681 aa, Artificial Sequence
  Synthetic polypeptide
MRTTCFFISLILIQGIKTLPILEIASNDQPQNVDSVCSGTLQKTEDVHLMGFTLSGQKVADSPLEASKRWAFRTGVPPKNVEYTEGEEAKTCYNISVTDPSGKSLLLDPPTNVRDYPKCKTIHHIQGQNPHAQGIALHLWGAFFLYDRIASTTMYRGKVFTEGNIAAMIVNKTVHKMIFSRQGQGYRHMNLTSTNKYWTSSNGTQTNDTGCFGTLQEYNSTKNQTCAPSKTPPPPPTAHPEVKPTRTPTDATRLNTTNPNSDDEDLTTSGSGSGEQEPYTTSDAVTKQGLSSTMPPTPSPQPGTPQQGGNNTNHSQDAATKLDNTNTTAQPPTPSHNTTTISTNNTSKHNLSTLSEPPQNTTNPNTQSMVTENEKTSAPPKTTLPPTESPTTEKSTNNTKSPTTMEPNTTNGHFTSPSSTPNSTTQHLIYFRRKRSILWREGDMFPFLDGLINAPIDFDPVPNTKTIFDESSSSGASAEEDQHASSNISLTLSYLPHTSENTAYSGENENDCDAELRIWSVQEDDLAAGLSWIPFFGPGIEGLYTAGLIKNQNNLVCRLRRLANQTAKSLELLLRVTTEERTFSLINRHAIDFLLTRWGGTCKVLGPDCCIGIEDLSRNISEQIDQIKKDEQKEGTGWGLGGKWWTSDWGVLTNLGILLLLSIAVLIALSCICRIFTKYIG

SEQ ID NO: 97 - protein, 681 aa, Artificial Sequence; identical to SEQ ID NO: 87
  Synthetic polypeptide

SEQ ID NO: 98 - protein, 681 aa, Artificial Sequence; identical to SEQ ID NO: 95
  Synthetic polypeptide

SEQ ID NO: 99 - protein, 681 aa, Artificial Sequence; identical to SEQ ID NO: 95
  Synthetic polypeptide

SEQ ID NO: 100 - protein, 681 aa, Artificial Sequence; identical to SEQ ID NO: 95
  Synthetic polypeptide

SEQ ID NO: 101 - protein, 681 aa, Artificial Sequence; identical to SEQ ID NO: 95
  Synthetic polypeptide

SEQ ID NO: 102 - protein, 681 aa, Artificial Sequence
  Synthetic polypeptide
MRTTCFFISLILIQGIKTLPILEIASNDQPQNVDSVCSGTLQKTEDVHLMGFTLSGQKVADSPLEASKRWAFRTGVPPKNVEYTEGEEAKTCYNISVTDPSGKSLLLDPPTNVRDYPKCKTIHHIQGQNPHAQGIALHLWGAFFLYDRIASTTMYRGKVFTEGNIAAMIVNKTVHKMIFSRQGQGYRHMNLTSTNKYWTSSNGTQTNDTGCFGTLQEYNSTKNQTCAPSKTPPPPPTARPEIKPTSTPTDATRLNTTNPNSDDEDLTTSGSGSGEQEPYTTSDAVTKQGLSSTMPPTPSPQPGTPQQGGNNTNHSQDAATELDNTNTIAQLPTPSHNTTTISTNNTSKHNLSTLSEPPQNTTNPNTQSMATENEKTSAPPKTTLPPTESPTTEKSTNNTKSPTTMEPNTTNGHFTSPSSTPNSTTQHLIYFRRKRSILWREGDMFPFLDGLINAPIDFDPVPNTKTIFDESSSSGASAEEDQHASSNISLTLSYLPHTSENTAYSGENENDCDAELRIWSVQEDDLAAGLSWIPFFGPGIEGLYTAGLIKNQNNLVCRLRRLANQTAKSLELLLRVTTEERTFSLINRHAIDFLLTRWGGTCKVLGPDCCIGIEDLSRNISEQIDQIKKDEQKEGTGWGLGGKWWTSDWGVLTNLGILLLLSIAVLIALSCICRIFTKYIG

SEQ ID NO: 103 - protein, 681 aa, Artificial Sequence
  Synthetic polypeptide
MRTTCFFISLILIQGIKTLPILEIASNDQPQNVDSVCSGTLQKTEDVHLMGFTLSGQKVADSPLEASKRWAFRTGVPPKNVEYTEGEEAKTCYNISVTDPSGKSLLLDPPTNVRDYPKCKTIHHIQGQNPHAQGIALHLWGAFFLYDRIASTTMYRGKVFTEGNIAAMIVNKTVHKMIFSRQGQGYRHMNLTSTNKYWTSSNGTQTNDAGCFGTLQEYNSTKNQTCAPSKTPPPPPTAHPEVKPTRTPTDATRLNTTNPNSDDEDLTTSGSGSGEQEPYTTSDAVTKQGLSSTMPPTPSPQPGTPQQGGNNTNHSQDAATKLDNTNTTAQPPTPSHNTTTISTNNTSKHNLSTLSEPPQNTTNPNTQSMVTENEKTSAPPKTTLPPTESPTTEKSTNNTKSPTTMEPNTTNGHFTSPSSTPNSTTQHLIYFRRKRSILWREGDMFPFLDGLINAPIDFDPVPNTKTIFDESSSSGASAEEDQHASSNISLTLSYLPHTSENTAYSGENENDCDAELRIWSVQEDDLAAGLSWIPFFGPGIEGLYTAGLIKNQNNLVCRLRRLANQTAKSLELLLRVTTEERTFSLINRHAIDFLLTRWGGTCKVLGPDCCIGIEDLSRNISEQIDQIKKDEQKEGTGWGLGGKWWTSDWGVLTNLGILLLLSIAVLIALSCICRIFTKYIG

SEQ ID NO: 104 - protein, 681 aa, Artificial Sequence; identical to SEQ ID NO: 95
  Synthetic polypeptide

SEQ ID NO: 105 - protein, 681 aa, Artificial Sequence; identical to SEQ ID NO: 95
  Synthetic polypeptide

SEQ ID NO: 106 - protein, 681 aa, Artificial Sequence
  Synthetic polypeptide
MWTTCFFISLILIQGIKTLPILEIASNDQPQNVDSVCSGTLQKTEDVHLMGFTLSGQKVADSPLEASKRWAFRTGVPPKNVEYTEGEEAKTCYNISVTDPSGKSLLLDPPTNVRDYPKCKTIHHIQGQNPHAQGIALHLWGAFFLYDRIASTTMYRGKVFTEGNIAAMIVNKTVHKMIFSRQGQGYRHMNLTSTNKYWTSSNGTQTNDTGCFGTLQEYNSTKNQTCAPSKTPPPPPTAHPEIKPTSTPTDATRLNTTNPNSDDEDLTTSGSGSGEQEPYTTSDAVTKQGLSSTMPPTLSPQPGTPQQGGNNTNHSQDAATELDNTNTTAQPPMPSHNTTTISTNNTSKHNLSTLSEPPQNTTNPNTQSMATENEKTSAPPKTTLPPTESPTTEKSTNNTKSPTTMEPNTTNGHFTSPSSTPNSTTQHLIYFRRKRSILWREGDMFPFLDGLINAPIDFDPVPNTKTIFDESSSSGASAEEDQHASSNISLTLSYLPHTSENTAYSGENENDCDAELRIWSVQEDDLAAGLSWIPFFGPGIEGLYTAGLIKNQNNLVCRLRRLANQTAKSLELLLRVTTEERTFSLINRHAIDFLLTRWGGTCKVLGPDCCIGIEDLSRNISEQIDQIKKDEQKEGTGWGLGGKWWTSDWGVLTNLGILLLLSIAVLIALSCICRIFTKYIG

SEQ ID NO: 107 - protein, 681 aa, Artificial Sequence
  Synthetic polypeptide
MWTTCFFISLILIQGIKTLPILEIASNDQPQNVDSVCSGTLQKTEDVHLMGFTLSGQKVADSPLEASKRWAFRTGVPPKNVEYTEGEEAKTCYNISVTDPSGKSLLLDPPTNVRDYPKCKTIHHIQGQNPHAQGIALHLWGAFFLYDRIASTTMYRGKVFTEGNIAAMIVNKTVHKMIFSRQGQGYRHMNLTSTNKYWTSSNGTQTNDTGCFGTLREYNSTKNQTCAPSKTPPPPPTAHPEIKPTSTPTDATRLNTTNPNSDDEDLTTSGSGSGEQEPYTTSDEVTKQGLSSTMPPTPSPQPGTPQQGGNNTNHSQDAATELDNTNTTAQPPMPSHNTTTISTNNTSKHNLSTLSEPPQNTTNPNTQSMATENEKTSAPPKTTLPPTESPTTEKSTNNTKSPTTMEPNKTNGHFTSPSSTPNSTTQHLIYFRRKRSILWREGDMFPFLDGLINAPIDFDPVPNTKTIFDESSSSGASAEEDQHASSNISLTLSYLPHTSENTAYSGENENDCDAELRIWSVQEDDLAAGLSWIPFFGPGIEGLYTAGLIKNQNNLVCRLRRLANQTAKSLELLLRVTTEERTFSLINRHAIDFLLTRWGGTCKVLGPDCCIGIEDLSRNISEQIDQIKKDEQKEGTGWGLGGKWWTSDWGVLTNLGILLLLSIAVLIALSCICRIFTKYIG

SEQ ID NO: 108 - protein, 681 aa, Artificial Sequence
  Synthetic polypeptide
MWTTCFFISLILIQGIKTLPILEIASNDQPQNVDSVCSGTLQKTEDVHLMGFTLSGQKVADSPLEASKRWAFRTGVPPKNVEYTEGEEAKTCYNISVTDPSGKSLLLDPPTNVRDYPKCKTIHHIQGQNPHAQGIALHLWGAFFLYDRIASTTMYRGKVFTEGNIAAMIVNKTVHKMIFSRQGQGYRHMNLTSTNKYWTSSNGTQTNDTGCFGTLREYNSTKNQTCAPSKTPPPPPTAHPEIKPTSTPTDATRLNTTNPNSDDEDLTTSGSGSGEQEPYTTSDAVTKQGLSSTMPPTPSPQPGTPQQGGNNTNHSQDAATELDNTNTTAQPPMPSHNTTTISTNNTSKHNLSTLSEPPQNTTNPNTQSMATENEKTSAPPKTTLPPTESPTTEKSTNNTKSPTTMEPNTTNGHFTSPSSTPNSTTQHLIYFRRKRSILWREGDMFPFLDGLINAPIDFDPVPNTKTIFDESSSSGASAEEDQHASSNISLTLSYLPHTSENTAYSGENENDCDAELRIWSVQEDDLAAGLSWIPFFGPGIEGLYTAGLIKNQNNLVCRLRRLANQTAKSLELLLRVTTEERTFSLINRHAIDFLLTRWGGTCKVLGPDCCIGIEDLSRNISEQIDQIKKDEQKEGTGWGLGGKWWTSDWGVLTNLGILLLLSIAVLIALSCICRIFTKYIG

SEQ ID NO: 109 - protein, 681 aa, Artificial Sequence
  Synthetic polypeptide
MWTTCFFISLILIQGIKTLPILEIASNDQPQNVDSVCSGTLQKTEDVHLMGFTLSGQKVADSPLEASKRWAFRTGVPPKNVEYTEGEEAKTCYNISVTDPSGKSLLLDPPTNVRDYPKCKTIHHIQGQNPHAQGIALHLWGAFFLYDRIASTTMYRGKVFTEGNIAAMIVNKTVHKMIFSRQGQGYRHMNLTSTNKYWTSSNGTQTNDTGCFGTLREYNSTKNQTCAPSKTPPPPPTAHPEIKPTSTPTDATRLNTTNPNSDDEDLITSGSGSGEQEPYTTSDAVTKQGLSSTMPPTPSPQPGTPQQGGNNTNHSQDAATELDNTNTTAQPPMPSHNTTTISTNNTSKHNLSTLSEPPQNTTNPNTQSMATENEKTSAPPKTTLPPTESPTTEKSTNNTKSPTTMEPNKTNGHFTSPSSTPNSTTQHLIYFRRKRSILWREGDMFPFLDGLINAPIDFDPVPNTKTIFDESSSSGASAEEDQHASSNISLTLSYLPHTSENTAYSGENENDCDAELRIWSVQEDDLAAGLSWIPFFGPGIEGLYTAGLIKNQNNLVCRLRRLANQTAKSLELLLRVTTEERTFSLINRHAIDFLLTRWGGTCKVLGPDCCIGIEDLSRNISEQIDQIKKDEQKEGTGWGLGGKWWTSDWGVLTNLGILLLLSIAVLIALSCICRIFTKYIG

SEQ ID NO: 110 - protein, 681 aa, Artificial Sequence; identical to SEQ ID NO: 96
  Synthetic polypeptide

SEQ ID NO: 111 - protein, 681 aa, Artificial Sequence; identical to SEQ ID NO: 95
  Synthetic polypeptide

SEQ ID NO: 112 - protein, 681 aa, Artificial Sequence
  Synthetic polypeptide
MWTTCFFISLILIQGIKTLPILEIASNDQPQNVDSVCSGTLQKTEDVHLMGFTLSGQKVADSPLEASKRWAFRTGVPPKNVEYTEGEEAKTCYNISVTDPSGKSLLLDPPTNVRDYPKCKTIHHIQGQNPHAQGIALHLWGAFFLYDRIASTTMYRGKVFTEGNIAAMIVNKTVHKMIFSRQGQGYRHMNLTSTNKYWTSSNGTQTNDTGCFGTLREYNSTKNQTCAPSKTPPPPPTAHPEIKPTSTPTDATRLNTTNPNSDDEDLTTSGSGSGEQEPYTTSDAVTEQGLSSTMPPTPSPQPGTPQQGGNNTNHSQDAATELDNTNTTAQPPMPSHNTTTISTNNTSKHNLSILSEPPQNTTNPNTQSMATENEKTSAPPKTTLPPTESPTTEKSTNNTKSPTTMEPNTTNGHFTSPSSTPNSTTQHLIYFRRKRSILWREGDMFPFLDGLINAPIDFDPVPNTKTIFDESSSSGASAEEDQHASSNISLTLSYLPHTSENTAYSGENENDCDAELRIWSVQEDDLAAGLSWIPFFGPGIEGLYTAGLIKNQNNLVCRLRRLANQTAKSLELLLRVTTEERTFSLINRHAIDFLLTRWGGTCKVLGPDCCIGIEDLSRNISEQIDQIKKDEQKEGTGWGLGGKWWTSDWGVLTNLGILLLLSIAVLIALSCICRIFTKYIG

SEQ ID NO: 113 - protein, 681 aa, Artificial Sequence
  Synthetic polypeptide
MWTTCFFISLILIQGIKTLPILEIASNDQPQNVDSVCSGTLQKTEDVHLMGFTLSGQKVADSPLEASKRWAFRTGVPPKNVEYTEGEEAKTCYNISVTDPSGKSLLLDPPTNVRDYPKCKTIHHIQGQNPHAQGIALHLWGAFFLYDRIASTTMYRGKVFTEGNIAAMIVNKTVHKMIFSRQGQGYRHMNLTSTNKYWTSSNGTQTNDTGCFGTLREYNSTKNQTCAPSKTPPPPPTAHPEIKPTSTPTDATRLNTTNPNSDDEDLTTSGSGSGEQEPYTTSDAVTKQGLSSTMPPTPSPQPGTPQQGGNNTNHSQDAATELDNTNTTAQPPMPSHNTTTISTNNTSKHNLSTLSEPPQNTTNPNTQSMATENEKTSAPPKTTLPPTESPTTEKSTNNTKSPTTMEPNKTNGHFTSPSSTPNSTTQHPIYFRRKRSILWREGDMFPFLDGLINAPIDFDPVPNTKTIFDESSSSGASAEEDQHASSNISLTLSYLPHTSENTAYSGENENDCDAELRIWSVQEDDLAAGLSWIPFFGPGIEGLYTAGLIKNQNNLVCRLRRLANQTAKSLELLLRVTTEERTFSLINRHAIDFLLTRWGGTCKVLGPDCCIGIEDLSRNISEQIDQIKKDEQKEGTGWGLGGKWWTSDWGVLTNLGILLLLSIAVLIALSCICRIFTKYIG

SEQ ID NO: 114 - protein, 681 aa, Artificial Sequence; identical to SEQ ID NO: 106
  Synthetic polypeptide

SEQ ID NO: 115 - protein, 681 aa, Artificial Sequence
  Synthetic polypeptide
MKTTCLLISLILIQGVKTLPILEIASNIQPQNVDSVCSGTLQKTEDVHLMGFTLSGQKVADSPLEASKRWAFRAGVPPKNVEYTEGEEAKTCYNISVTDPSGKSLLLDPPTNIRDYPKCKTIHHIQGQNPHAQGIALHLWGAFFLYDRIASTTMYRGKVFTEGNIAAMIVNKTVHKMIFSRQGQGYRHMNLTSTNKYWTSSNGTQTNDTGCFGTLQEYNSTKNQTCAPSKKPLPLPTAHPEVKLTSTSTDATKLNTTDPNSDDEDLTTSGSGSGEQEPYTTSDAATKQGLSSTMPPTPSPQPSTPQQGGNNTNHSQGVVTEPGKTNTTAQPSMPPHNTTTISTNNTSKHNLSTPSVPIQNATNYNTQSTAPENEQTSAPSKTTLLPTENPTTAKSTNSTKSPTTTVPNTTNKYSTSPSPTPNSTAQHLVYFRRKRNILWREGDMFPFLDGLINAPIDFDPVPNTKTIFDESSSSGASAEEDQHASPNISLTLSYFPKVNENTAHSGENENDCDAELRIWSVQEDDLAAGLSWIPFFGPGIEGLYTAGLIKNQNNLVCRLRRLANQTAKSLELLLRVTTEERTFSLINRHAIDFLLARWGGTCKVLGPDCCIGIEDLSRNISEQIDQIKKDEQKEGTGWGLGGKWWTSDWGVLTNLGILLLLSIAVLIALSCICRIFTKYIG

SEQ ID NO: 116 - protein, 681 aa, Artificial Sequence; identical to SEQ ID NO: 115
  Synthetic polypeptide

SEQ ID NO: 117 - protein, 681 aa, Artificial Sequence; identical to SEQ ID NO: 115
  Synthetic polypeptide

SEQ ID NO: 118 - protein, 681 aa, Artificial Sequence; identical to SEQ ID NO: 115
  Synthetic polypeptide

SEQ ID NO: 119 - protein, 681 aa, Artificial Sequence; identical to SEQ ID NO: 115
  Synthetic polypeptide

SEQ ID NO: 120 - protein, 681 aa, Artificial Sequence; identical to SEQ ID NO: 115
  Synthetic polypeptide

SEQ ID NO: 121 - protein, 681 aa, Artificial Sequence; identical to SEQ ID NO: 115
  Synthetic polypeptide

SEQ ID NO: 122 - protein, 681 aa, Artificial Sequence; identical to SEQ ID NO: 115
  Synthetic polypeptide

SEQ ID NO: 123 - protein, 681 aa, Artificial Sequence; identical to SEQ ID NO: 115
  Synthetic polypeptide

SEQ ID NO: 124 - protein, 681 aa, Artificial Sequence
  Synthetic polypeptide
MKTIYFLISLILIQSIKTLPVLEIASNSQPQDVDSVCSGTLQKTEDVHLMGFTLSGQKVADSPLEASKRWAFRTGVPPKNVEYTEGEEAKTCYNISVTDPSGKSLLLDPPSNIRDYPKCKTVHHIQGQNPHAQGIALHLWGAFFLYDRVASTTMYRGKVFTEGNIAAMIVNKTVHRMIFSRQGQGYRHMNLTSTNKYWTSSNETRRNDTGCFGILQEYNSTNNQTCSPSLKPPSLPTVTPSIHSTNTQINTAKSGTMNPSSDDEDLMISGSGSGEQGPHTTLNVVTEQKQSSTILSTPSLHLSTSQHEQNSTNPSRHAVTEHNGTDPTTQPATLLNNTHTTPTYNTLKYNLSTPSPPPRNITNNDTQRELAESEQTNAQLNTTLDPTENPTTAQDTNSTTNIIMTTSDITSKHPTNSSSDSSPTTRPPIYFRKKRSIFWKEGDIFPFLDGLISTEIDFDPIPNTETIFDESPSFNTSTNEEQHTPPNISLTFSYFPDKNGDTAYSGENENDCDAELRIWSVQEDDLAAGLSWIPFFGPGIEGLYTAGLIKNQNNLVCRLRRLANQTAKSLELLLRVTTEERTFSLINRHAIDFLLTRWGGTCKVLGPDCCIGIEDLSKNISEQIDKIRKDEQKEETGWGLGGKWWTSDWGVLTNLGILLLLSIAVLIALSCICRIFTKYIG

SEQ ID NO: 125 - protein, 681 aa, Artificial Sequence
  Synthetic polypeptide
MRTTCFFISLILIQGIKTLPILEIASNDQPQNVDSVCSGTLQKTEDVHLMGFTLSGQKVADSPLEASKRWAFRTGVPPKNVEYTEGEEAKTCYNISVTDPSGKSLLLDPPTNVRDYPKCKTIHHIQGQNPHAQGIALHLWGAFFLYDRIASTTMYRGKVFTEGNIAAMIVNKTVHKMIFSRQGQGYRHMNLTSTNKYWTSSNGTQTNDTGCFGTLQEYNSTKNQTCTPSKTPPSPPTAHPEIKPTSTPTDATRLNTTNPNSDDEDLTTSGSGSGEQEPDTTSDAVTKQGLSSTMPPTPSPQPGTPQQGGNNTNHSQDAATELDNSNTTAQPPTPSHNTTTISTNNTSKHNLSTLSELPQNTTNPNTQSMATENEKTSASPKTTLPPTESPTTEKSTNNTKSPTTMEPNTTNGHFTSPSSTPNSTTQHLIYFRRKRSILWREGDMFPFLDGLINAPIDFDPVPNTKTIFDESSSSGASAEEDQHASSNISLTLSYLPHTSENTAYSGENENDCDAELRIWSVQEDDLAAGLSWIPFFGPGIEGLYTAGLIKNQNNLVCRLRRLANQTAKSLELLLRVTTEERTFSLINRHAIDFLLTRWGGTCKVLGPDCCIGIEDLSRNISEQIDQIKKDEQKEGTGWGLGGKWWTSDWGVLTNLGILLLLSIAVLIALSCICRIFTKYIG

SEQ ID NO: 126 - protein, 681 aa, Artificial Sequence
  Synthetic polypeptide
MKTTCLFIGLILIQRIKTLPILEIASNNQPQNMDSVCSGTLQKTEDVHLMGFTLSGQKVADSPLEASKRWAFRTGVPPKNVEYTEGEEAKTCYNISVTDPSGKSLLLDPPTNIRDYPKCKTIHHIQGQNPHAQGIALHLWGAFFLYDRIASTTMYRGRVFTEGNIAAMIVNKTVHKMIFSRQGQGYRHMNLTSTNKYWTSNNGTQTNDTGCFGALQEYNSTKNQTCAPSKIPSPLPTTRSEIKPTSTPTDATALNTTDPNSDDEDLITSGSGSGEQEPYTTSDAVTKQGFSSTMPPTPSPQPSTPQQEGNNTDHSQGAVTEPNKTNTTAQPSMPPHNTTAISTNNTSKSNFSTLSAPPQNTTNYDTQSTATENEQTSAPLKTTLPPTGNLTTAKSTNNTKGPTTTAPNMTNEHLTSPSPTPNPTTQHLVYFRKKRSILWREGDMFPFLDGLINAPIDFDPVPNTKTIFDESSSSGASAEEDQHASPNISLTLSYFPNINENTAYSGENEDDCDAELRIWSVQEDDLAAGLSWIPFFGPGIEGLYTAGLIKNQNNLVCRLRRLANQTAKSLELLLRVTTEERTFSLINRHAIDFLLTRWGGTCKVLGPDCCIGIEDLSRNISEQIDQIKKDEQKEGTGWGLGGKWWTSDWGVLTNLGILLLLSIAVLIALSCICRIFTKYIG

SEQ ID NO: 127 - protein, 681 aa, Artificial Sequence
  Synthetic polypeptide
MRTTCFFISLILIQGIKTLPILEIASNDQPQNVDSVCSGTLQKTEDVHLMGFTLSGQKVADSPLEASKRWAFRTGVPPKNVEYTEGEEAKTCYNISVTDPSGKSLLLDPPTNVRDYPKCKTIHHIQGQNPHAQGIALHLWGAFFLYDRIASTTMYRGKVFTEGNIAAMIVNKTVHKMIFSRQGQGYRHMNLTSTNKYWTSSNGTQTNDTGCFGTLQEYNSTKNQTCTPSKTPPPPPTAYPEIKPTSTPTDATRLNTTNPNSDDEDLTTSGSGSGEQEPDTTSDAVTKQGLSSTMPPTPSPQPGTPQQGGNNTNHSQDAATELDNTNTTAQPPTPSHNTTTISTNNTSKHNLSTLSELPQNTTNPNTQSMATENEKTSASPKTTLPPTESPTTEKSTNNTKSPTTMEPNTTNGHFTSPSSTPNSTTQHLIYFRRKRSILWREGDMFPFLDGLINAPIDFDPVPNTKTIFDESSSSGASAEEDQHASSNISLTLSYLPHTSENTAYSGENENDCDAELRIWSVQEDDLAAGLSWIPFFGPGIEGLYTAGLIKNQNNLVCRLRRLANQTAKSLELLLRVTTEERTFSLINRHAIDFLLTRWGGTCKVLGPDCCIGIEDLSRNISEQIDQIKKDEQKEGTGWGLGGKWWTSDWGVLTNLGILLLLSIAVLIALSCICRIFTKYIG

SEQ ID NO: 128 - protein, 681 aa, Artificial Sequence
  Synthetic polypeptide
MKTTCLFISLILIQGIKTLPILEIASNNQPQNVDSVCSGTLQKTEDVHLMGFTLSGQKVADSPLEASKRWAFRTGVPPKNVEYTEGEEAKTCYNISVTDPSGKSLLLDPPTNIRDYPKCKTIHHIQGQNPHAQGIALHLWGAFFLYDRIASTTMYRGRVFTEGNIAAMIVNKTVHKMIFSRQGQGYRHMNLTSTNKYWTSNNGTQTNDTGCFGALQEYNSTKNQTCAPSKIPSPLPTTRPENKPTSTPTDATALNTTDPNSDDEDLTTSGSGSGEQEPHTTSDAVTTQGPSSTMPPTPSPQPSTPQQEGNNTDHSQSAVTEPNKTNTTAQPSMPPHNTTAISTNNTSKSNFSTLSAPLQNTINYDTQSTATENEQTSAPSKTTLPPTGNLTTAKSTNNTKGPTTTAPNMTNGHLTSPSPTPNPTTQHLVYFRKKRSILWREGDMFPFLDGLINAPIDFDPVPNTKTIFDESSSSGASTEEDQHASPNISLTLSYFPNINENTAYSGENENDCDAELRIWSVQEDDLAAGLSWIPFFGPGIEGLYTAGLIKNQNNLVCRLRRLANQTAKSLELLLRVTTEERTFSLINRHAIDFLLTRWGGTCKVLGPDCCIGIEDLSRNISEQIDQIKKDEQKEGTGWGLGGKWWTSDWGVLTNLGILLLLSIAVLIALSCICRIFTKYIG

SEQ ID NO: 129 - protein, 681 aa, Artificial Sequence
  Synthetic polypeptide
MKTIYFLISLILIQSIKTLPVLEIASNSQPQDVDSVCSGTLQKTEDVHLMGFTLSGQKVADSPLEASKRWAFRTGVPPKNVEYTEGEEAKTCYNISVTDPSGKSLLLDPPSNIRDYPKCKTVHHIQGQNPHAQGIALHLWGAFFLYDRVASTTMYRGKVFTEGNIAAMIVNKTVHRMIFSRQGQGYRHMNLTSTNKYWTSSNETRRNDTGCFGILQEYNSTNNQTCSPSLKPPSLPTVTPSIHSTNTQINTAKSGTINPSSDDEDLMVSGSGSGEQGPHTTLNVVTEQKQSSTILSTPSLHPSTPQHEQNSTNPSRHAVTEHNGTDPTTQPATLLNNTNTTPTYNTLKYNLSTPSPPTRNITNNDTQRELAESEQTNAQLNTTPDPTENPTTAQDTNSTTNITMTTSDITSKHPTNSSPDSSPTTRPPIYFRKKRSIFWKEGDIFPFLDGLINTEIDFDPIPNTETIFDESPSFNTSTNEEQHTPPNISLTFSYFPDKNGDTAYSGENENDCDAELRIWSVQEDDLAAGLSWIPFFGPGIEGLYTAGLIKNQNNLVCRLRRLANQTAKSLELLLRVTTEERTFSLINRHAIDFLLTRWGGTCKVLGPDCCIGIEDLSKNISEQIDKIRKDEQKEETGWGLGGKWWTSDWGVLTNLGILLLLSIAVLIALSCICRIFTKYIG

SEQ ID NO: 130 - protein, 681 aa, Artificial Sequence
  Synthetic polypeptide
MKTTCLFIGLILIQRIKTLPILEIASNNQPQNMDSVCSGTLQKTEDVHLMGFTLSGQKVADSPLEASKRWAFRTGVPPKNVEYTEGEEAKTCYNISVTDPSGKSLLLDPPTNIRDYPKCKTIHHIQGQNPHAQGIALHLWGAFFLYDRIASTTMYRGRVFTEGNIAAMIVNKTVHKMIFSRQGQGYRHMNLTSTNKYWTSNNGTQTNDTGCFGALQEYNSTKNQTCAPSKIPSPLPTTRSEIKPTSTPTDATALNTTDPNSDDEDLITSGSGSGEQEPYTTSDAVTKQGFSSTVPPTPSPQPSTPQQEGNNADHSQGAVTEPNKTNTTAQPSMPPHNTTAISTNNTSKSNFSTLSAPPQNTTNYGTQSTATENEQTSAPLKATLPPTGNLTTAKSTNNTKGPTTTAPNMTNEHLTSPSPTPNPTTQHLVYFRKKRSILWREGDMFPFLDGLINAPIDFDPVPNTKTIFDESSSSGASAEEDQHASPNISLTLSYFPNINENTAYSGENENDCDAELRIWSVQEDDLAAGLSWIPFFGPGIEGLYTAGLIKNQNNLVCRLRRLANQTAKSLELLLRVTTEERTFSLINRHAIDFLLTRWGGTCKVLGPDCCIGIEDLSRNISEQIDQIKKDEQKEGTGWGLGGKWWTSDWGVLTNLGILLLLSIAVLIALSCICRIFTKYIG

SEQ ID NO: 131 - protein, 681 aa, Artificial Sequence
  Synthetic polypeptide
MRTTCFFISLILIQGIKTLPILEIASNDQPQNVDSVCSGTLQKTEDVHLMGFTLSGQKVADSPLEASKRWAFRTGVPPKNVEYTEGEEAKTCYNISVTDPSGKSLLLDPPTNVRDYPKCKTIHHIQGQNPHAQGIALHLWGAFFLYDRIASTTMYRGKVFTEGNIAAMIVNKTVHKMIFSRQGQGYRHMNLTSTNKYWTSSNGTQTNDTGCFGTLQEYNSTKNQTCTPSKTPPSPPTAHPEIKPTSTPTDATRLNTTNPNSDDEDLTTSGSGSGEQEPDTTSDAVTKQGLSSTMPPTPSPQPGTPQQGGNNTNHSQDAATELDNTNTTAQPPTPSHNTTTISTNNTSKNNLSTLSELPQNTTNPNTQSMATENEKTSASPKTTLPPTESPTTEKSTNNTKSPTTMEPNTTNGHFTSPSSTPNSTTQHLIYFRRKRSILWREGDMFPFLDGLINAPIDFDPVPNTKTIFDESSSSGASAEEDQHASSNISLTLSYLPHTSENTAYSGENENDCDAELRIWSVQEDDLAAGLSWIPFFGPGIEGLYTAGLIKNQNNLVCRLRRLANQTAKSLELLLRVTTEERTFSLINRHAIDFLLTRWGGTCKVLGPDCCIGIEDLSRNISEQIDQIKKDEQKEGTGWGLGGKWWTSDWGVLTNLGILLLLSIAVLIALSCICRIFTKYIG

SEQ ID NO: 132 - protein, 681 aa, Artificial Sequence
  Synthetic polypeptide
MRTTCFFISLILIQGIKTLPILEIASNDQPQNVDSVCSGTLQKTEDVHLMGFTLSGQKVADSPLEASKRWAFRTGVPPKNVEYTEGEEAKTCYNISVTDPSGKSLLLDPPTNVRDYPKCKTIHHIQGQNPHAQGIALHLWGAFFLYDRIASTTMYRGKVFTEGNIAAMIVNKTVHKMIFSRQGQGYRHMNLTSTNKYWTSSNGTQTNDTGCFGTLQEYNSTKNQTCTPSKTPPPPPTAYPEIKPTSTSTDATRLNTTNPNSDDEDLTTSGSGSGEQEPDTTSDAVTKQGLSSTMPPTPSPQPGTPQQGGNNTNHSQDAATELDNTNTTAQPPTPSHNTTTISTNNTSKHNLSTLSELPQNTTNPNTQSMATENEKTSASPKTTLPPTESPTTEKSTNNTKSPTTMEPNTTNGHFTSPSSTPNSTTQHLIYFRRKRSILWREGDMFPFLDGLINAPIDFDPVPNTKTIFDESSSSGASAEEDQHASSNISLTLSYLPHTSENTAYSGENENDCDAELRIWSVQEDDLAAGLSWIPFFGPGIEGLYTAGLIKNQNNLVCRLRRLANQTAKSLELLLRVTTEERTFSLINRHAIDFLLTRWGGTCKVLGPDCCIGIEDLSRNISEQIDQIKKDEQKEGTGWGLGGKWWTSDWGVLTNLGILLLLSIAVLIALSCICRIFTKYIG

SEQ ID NO: 133 - protein, 681 aa, Artificial Sequence
  Synthetic polypeptide
MRTTCFFISLILIQGIKTLPILEIASNDQPQNVDSVCSGTLQKTEDVHLMGFTLSGQKVADSPLEASKRWAFRTGVPPKNVEYTEGEEAKTCYNISVTDPSGKSLLLDPPTNVRDYPKCKTIHHIQGQNPHAQGIALHLWGAFFLYDRIASTTMYRGKVFTEGNIAAMIVNKTVHKMIFSRQGQGYRHMNLTSTNKYWTSSNGTQTNDTGCFGTLQEYNSTKNQTCTPSKTPPPPPTAHPEIKPTSTPTDATRLNTTNPNSDDEDLTTSGSGSGEQEPYTTSDAVTKQGLSSTMPPTPSPQPGTPQQGGNNTNHSQDAATELDNTNTTAQPPTPSHNTTTISTNNTSKHNLSTLSELPQNITNPNTQSMATENEKTSASPKTTLPPTESPTTEKSTNNTKSPTTMEPNTTNGHFTSPSSTPNSTTQHLIYFRRKRSILWREGDMFPFLDGLINAPIDFDPVPNTKTIFDESSSSGASAEEDQHASSNISLTLSYLPHTSENTAYSEENENDCDAELRIWSVQEDDLAAGLSWIPFFGPGIEGLYTAGLIKNQNNLVCRLRRLANQTAKSLELLLRVTTEERTFSLINRHAIDFLLTRWGGTCKVLGPDCCIGIEDLSRNISEQIDQIKKDEQKEGTGWGLGGKWWTSDWGVLTNLGILLLLSIAVLIALSCICRIFTKYIG

SEQ ID NO: 134 - protein, 681 aa, Artificial Sequence
  Synthetic polypeptide
MKTTCLLISLILIQGVKTLPILEIASNIQPQNVDSVCSGTLQKTEDVHLMGFTLSGQKVADSPLEASKRWAFRAGVPPKNVEYTEGEEAKTCYNISVTDPSGKSLLLDPPTNIRDYPKCKTIHHIQGQNPHAQGIALHLWGAFFLYDRIASTTMYRGKVFTEGNIAAMIVNKTVHKMIFSRQGQGYRHMNLTSTNKYWTSSNGTQTNDTGCFGTLQEYNSTKNQTCAPSKKPLPLPTAHPEVKLTSTSTDATKLNTTDPNSDDEDLTTSGSGSGEQEPYTTSDAATKQGLSSTMPPTPSPQPSTPQQGGNNTNHSQGVVTEPGKTNTTAQPSMPPHNTTTISTNNTSKHNLSTPSVPIQNATNYNTQSTAPENEQTSAPSKTTLLPTENPTTAKSTNSTKSPTTTVPNTTNKYSTSPSPTPDSTAQHLVYFRRKRNILWREGDMFPFLDGLINAPIDFDPVPNTKTIFDESSSSGASAEEDQHASPNISLTLSYFPKVNENTAHSGENENDCDAELRIWSVQEDDLAAGLSWIPFFGPGIEGLYTAGLIKNQNNLVCRLRRLANQTAKSLELLLRVTTEERTFSLINRHAIDFLLARWGGTCKVLGPDCCIGIEDLSRNISEQIDQIKKDEQKEGTGWGLGGKWWTSDWGVLTNLGILLLLSIAVLIALSCICRIFTKYIG

SEQ ID NO: 135 - DNA, 2049 bp, Artificial Sequence
  Synthetic polynucleotide
atggaaacccctgcccagctgctattcctgctgctcctctggctgcctgacaccaccggcctgcccatcctggaaatcgccagcaacaatcagccacagaacgtggacagcgtgtgcagcggcaccctgcagaaaaccgaagacgtgcacctgatgggcttcaccctgagcggacaaaaggtagccgacagccctttagaggccagcaagagatgggccttcagaaccggcgtgccccccaagaatgtggagtacacggagggcgaggaagccaagacctgttacaacatcagcgtgaccgatccaagcggcaagtctctgctgttggacccccctaccaacatccgggactaccccaagtgcaagaccatccatcacatccagggccagaaccctcacgcccagggaattgccctgcacctgtggggcgcctttttcctgtacgaccggatcgcctccaccaccatgtaccggggcaaggtgttcacagagggtaatatcgccgccatgatcgtgaacaaaaccgtgcacaaaatgatcttcagccgtcaaggccaaggctaccggcacatgaacctgaccagcaccaacaagtactggaccagcagcaacggcacccagaccaacgacaccggctgttttggagccctgcaggagtacaacagcacgaagaaccagacctgcgcccccagcaaaatccccccaccgctgcctacagccagacccgagatcaagctgacctccacccctaccgacgccaccaagctgaacaccacggaccctagcagcgacgacgaggatctggccacatcgggctctggcagcggcgagagagagccacataccacctctgacgccgtaaccaagcagggcctgagctccacaatgcctccgaccccatctcctcaacctagcacacctcagcaaggcggcaacaacaccaatcacagccaggatgctgtgaccgaactggacaagaacaataccaccgcccagccctccatgccccctcataacaccacaaccatctccacaaacaacacttccaagcacaacttcagcacactgtccgcccctctgcagaataccactaacgataacacccagagcaccatcaccgagaacgagcagacaagcgcccctagcatcaccaccctgcctcccaccggaaatccaacaaccgccaagagcacgagctccaagaagggccctgccaccacagcccccaacacgaccaatgagcactttaccagccccccgcccaccccctcctctacagcccagcacctggtgtacttccggcggaagagatccatcctgtggcgcgagggcgatatgttccccttcctggacggcctcatcaacgcccccatcgacttcgaccccgtgcccaacacaaagacgatcttcgacgaaagcagctcctccggcgccagcgccgaagaggatcagcatgccagcccaaacatctccctgaccctcagctacttccccaatatcaacgagaacaccgcctattccggcgagaatgagaacgactgcgacgccgagctgcggatttggagcgttcaggaagatgacctggccgctgggctgtcctggatcccttttttcggccctggaatcgagggcctgtacaccgccgtgctgattaagaatcagaacaacctcgtgtgccggctgcggcggctggccaatcagacagccaaaagcctggaactgctgctgagagtgaccaccgaggaacggaccttcagcctgatcaatcggcacgccatcgattttctgctgaccagatggggcggcacttgtaaggtgctgggccccgactgttgcatcggcatcgaggacctgagcaagaatatctccgagcaaatcgaccagatcaagaaggatgagcagaaagagggaaccgggtggggactgggcggaaagtggtggacatctgactggggcgtgctgactaacctgggaatacttctgctcctgtctatcgcagtgctgatcgccctgagctgcatctgccggatcttcaccaagtacatcggc

SEQ ID NO: 136 - DNA, 2049 bp, Artificial Sequence
  Synthetic polynucleotide
atggaaacccctgcccagctgctgttcctgcttctgctgtggctgcccgataccaccggactccccgtgctggaaatcgccagcaacagccagccccaggacgtggactctgtatgtagcggcaccctgcagaaaaccgaagacgtgcacctgatgggcttcaccctgagcgggcagaaagtggccgacagccctctggaagccagcaagagatgggccttcagaaccggcgtgccccccaaaaacgtggagtacacggagggcgaggaagccaagacctgctacaatatcagcgtgaccgaccccagcggcaagtctctcctgctggatcccccttctaacatccgggactatcccaagtgcaagaccgtgcaccacatccagggccagaatcctcacgcccagggaattgccctgcacttatggggcgcctttttcctgtatgaccgggtggccagcaccaccatgtaccggggcaaggtgttcaccgagggcaatatcgccgccatgatcgtgaacaagacagtgcacagaatgatcttcagcagacagggacagggctaccggcacatgaacctgacctccaccaacaagtactggaccagcagcaacgagacacagcggaacgacaccggctgcttcggcattctgcaagaatacaactcaaccaataaccagacctgcccccctagcctgaagcctccgtcgctgcctaccgtgacgcccagcatccacagcacaaatacccagatcaacaccgccaagtccggcaccatgaatcccagcagcgacgacgaggacctgatgatcagcggctctggcagcggcgagcagggccctcacacaacactgaacgttgtgaccgagcagaagcagagcagcactatcctgagcacccccagcctgcaccctagcacatctcaacacgagcaaaatagcaccaacccctcccgccacgccgtgacagagcacaacggcaccgacccgacaacccagcccgccaccttactgaacaacaccaacaccacccccacctataacaccttaaagtacaacctgtccaccccctccccccccacccggaacatcacaaacaacgacacgcagagagagctggccgaaagcgagcagacaaatgctcagctgaataccaccctggaccccaccgagaaccccacaaccggccaggacaccaattccacaaccaacatcataatgaccaccagcgacatcaccagcaagcacccgaccaacagctcccctgatagtagccccaccaccagaccacccatatacttcagaaagaagcggagcatcttctggaaagaaggcgatatctttcccttcctggacggcctgatcaatacggagatcgacttcgaccccatccccaacaccgagacgatcttcgacgagagccccagcttcaacacctccacaaatgaagaacagcacaccccgcccaacatttctctgaccttcagctacttccccgacaagaacggcgacaccgcctactccggcgagaacgagaatgactgcgatgccgaactgcggatttggagcgtacaggaagatgacctggccgctggcctgagctggataccttttttcggccctggcatcgagggcctgtacaccgccgggctgatcaagaatcagaacaacctcgtgtgccggctgcggagactggccaatcagacagccaaaagcctggaactgctgctaagagtgaccaccgaggaaagaaccttctccctcatcaaccggcatgccatcgactttctgctgaccagatggggaggcacatgcaaggtactgggccccgattgctgcatcggaatcgaggatctgagcaagaacatctccgaacagatcgacaagatccggaaggatgagcagaaagaggaaaccggctggggcctgggcgggaagtggtggacttctgattggggcgtgctcaccaacctgggaatcctgctgctcctctctatcgccgtgctgatcgcccttagctgcatctgccggattttcaccaagtacatcggc

SEQ ID NO: 137 - DNA, 2049 bp, Artificial Sequence
  Synthetic polynucleotide
atggaaacccctgcccagctgctgttcctgctgctattgtggctgcctgacaccacaggcctgcccatcctggaaatcgccagcaatgaccagccgcagaatgttgacagcgtgtgcagcggcactctgcagaaaaccgaggacgtgcacctgatgggcttcaccctgagcggacagaaggtggctgacagccctctggaagccagcaagagatgggccttcagaaccggagtgccccctaagaatgtggagtacaccgagggcgaggaagccaagacctgttacaacatcagcgtgaccgaccccagcggcaagtctctgttgttagaccctcctaccaatgtgcgggactaccccaagtgcaagaccattcatcacatccagggccagaacccccacgcccaaggaattgctctgcacctgtggggagcctttttcctgtatgaccggatcgcctccaccaccatgtaccggggcaaggtgttcacagagggcaatatcgccgccatgatcgtgaacaagaccgtgcacaagatgatcttcagcagacaaggccagggctaccgacacatgaacctgaccagcaccaacaagtactggaccagcagcaacggcacccagacgaacgacaccggctgcttcggaaccctgcaggagtacaactccaccaagaaccagacctgcaccccctccaagaccccgcctagtcctcctacagcgcaccccgagatcaagcccacctcaacccctaccgatgccacaagactgaacacgaccaaccccaacagcgacgacgaggacctcaccacaagcggctctggatccggagagcaggaacccgatacaacctctgacgccgtgaccaagcagggccttagcagcactatgcccccaaccccttcccctcagcctggcacacctcagcagggcggcaacaacacaaaccactctcaagatgccgccaccgagctggacaactcaaataccacagcccagccccccaccccatcacacaatacgaccacaatctccacaaacaataccagcaagcataacctgtctaccctgtccgagctgcctcagaacaccacaaatcctaacacgcagagcatggccacagagaacgagaagaccagcgcgagccccaaaaccacgctccctccaacagagagccccaccaccgaaaagagcacaaataataccaagtccccaacgaccatggaacccaacaccactaacggccactttaccagccctagctcgacgcccaatagcaccacccagcacttaatatactttcggcggaagcggagcatcctgtggcgggagggcgacatgttccccttcctggacggcctgataaacgcccccatcgacttcgaccccgtgcccaacactaagaccatcttcgacgaaagcagcagctccggcgccagcgccgaagaagatcagcacgccagctccaacatctccctgaccctgtcttacctgccccacaccagcgaaaacacagcctactccggcgagaatgagaacgactgcgacgccgaactgcggatttggagcgttcaagaagatgacctggccgctggcctgagctggataccttttttcggccctggcatcgagggactgtacaccgccggactgatcaagaatcagaacaacctcgtctgccggctgcggcggctggccaatcagacagccaaaagcctggaactgctgctgagagtgaccaccgaggaacggaccttctcccttatcaatcggcacgccatcgattttctgctgaccagatggggcggcacatgcaaagtgctgggccccgattgctgcatcggcattgaggacctgtcccggaacatttccgaacagatcgatcagatcaaaaaggacgagcagaaagagggcacgggctggggactgggcggaaagtggtggacatctgactggggagtcctgaccaatctgggaatacttctgctgctctctatcgccgtgctgattgccctcagctgcatctgtagaatcttcaccaagtacatcggc

SEQ ID NO: 138 - RNA, 2049 nt, Artificial Sequence
  Synthetic polynucleotide
auggaaaccccugcccagcugcuauuccugcugcuccucuggcugccugacaccaccggccugcccauccuggaaaucgccagcaacaaucagccacagaacguggacagcgugugcagcggcacccugcagaaaaccgaagacgugcaccugaugggcuucacccugagcggacaaaagguagccgacagcccuuuagaggccagcaagagaugggccuucagaaccggcgugccccccaagaauguggaguacacggagggcgaggaagccaagaccuguuacaacaucagcgugaccgauccaagcggcaagucucugcuguuggaccccccuaccaacauccgggacuaccccaagugcaagaccauccaucacauccagggccagaacccucacgcccagggaauugcccugcaccuguggggcgccuuuuuccuguacgaccggaucgccuccaccaccauguaccggggcaagguguucacagaggguaauaucgccgccaugaucgugaacaaaaccgugcacaaaaugaucuucagccgucaaggccaaggcuaccggcacaugaaccugaccagcaccaacaaguacuggaccagcagcaacggcacccagaccaacgacaccggcuguuuuggagcccugcaggaguacaacagcacgaagaaccagaccugcgcccccagcaaaauccccccaccgcugccuacagccagacccgagaucaagcugaccuccaccccuaccgacgccaccaagcugaacaccacggacccuagcagcgacgacgaggaucuggccacaucgggcucuggcagcggcgagagagagccacauaccaccucugacgccguaaccaagcagggccugagcuccacaaugccuccgaccccaucuccucaaccuagcacaccucagcaaggcggcaacaacaccaaucacagccaggaugcugugaccgaacuggacaagaacaauaccaccgcccagcccuccaugcccccucauaacaccacaaccaucuccacaaacaacacuuccaagcacaacuucagcacacuguccgccccucugcagaauaccacuaacgauaacacccagagcaccaucaccgagaacgagcagacaagcgccccuagcaucaccacccugccucccaccggaaauccaacaaccgccaagagcacgagcuccaagaagggcccugccaccacagcccccaacacgaccaaugagcacuuuaccagccccccgcccacccccuccucuacagcccagcaccugguguacuuccggcggaagagauccauccuguggcgcgagggcgauauguuccccuuccuggacggccucaucaacgcccccaucgacuucgaccccgugcccaacacaaagacgaucuucgacgaaagcagcuccuccggcgccagcgccgaagaggaucagcaugccagcccaaacaucucccugacccucagcuacuuccccaauaucaacgagaacaccgccuauuccggcgagaaugagaacgacugcgacgccgagcugcggauuuggagcguucaggaagaugaccuggccgcugggcuguccuggaucccuuuuuucggcccuggaaucgagggccuguacaccgccgugcugauuaagaaucagaacaaccucgugugccggcugcggcggcuggccaaucagacagccaaaagccuggaacugcugcugagagugaccaccgaggaacggaccuucagccugaucaaucggcacgccaucgauuuucugcugaccagauggggcggcacuuguaaggugcugggccccgacuguugcaucggcaucgaggaccugagcaagaauaucuccgagcaaaucgaccagaucaagaaggaugagcagaaagagggaaccggguggggacugggcggaaagugguggacaucugacuggggcgugcugacuaaccugggaauacuucugcuccugucuaucgcagugcugaucgcccugagcugcaucugccggaucuucaccaaguacaucggc

SEQ ID NO: 139 - RNA, 2049 nt, Artificial Sequence
  Synthetic polynucleotide
auggaaaccccugcccagcugcuguuccugcuucugcuguggcugcccgauaccaccggacuccccgugcuggaaaucgccagcaacagccagccccaggacguggacucuguauguagcggcacccugcagaaaaccgaagacgugcaccugaugggcuucacccugagcgggcagaaaguggccgacagcccucuggaagccagcaagagaugggccuucagaaccggcgugccccccaaaaacguggaguacacggagggcgaggaagccaagaccugcuacaauaucagcgugaccgaccccagcggcaagucucuccugcuggaucccccuucuaacauccgggacuaucccaagugcaagaccgugcaccacauccagggccagaauccucacgcccagggaauugcccugcacuuauggggcgccuuuuuccuguaugaccggguggccagcaccaccauguaccggggcaagguguucaccgagggcaauaucgccgccaugaucgugaacaagacagugcacagaaugaucuucagcagacagggacagggcuaccggcacaugaaccugaccuccaccaacaaguacuggaccagcagcaacgagacacagcggaacgacaccggcugcuucggcauucugcaagaauacaacucaaccaauaaccagaccugccccccuagccugaagccuccgucgcugccuaccgugacgcccagcauccacagcacaaauacccagaucaacaccgccaaguccggcaccaugaaucccagcagcgacgacgaggaccugaugaucagcggcucuggcagcggcgagcagggcccucacacaacacugaacguugugaccgagcagaagcagagcagcacuauccugagcacccccagccugcacccuagcacaucucaacacgagcaaaauagcaccaaccccucccgccacgccgugacagagcacaacggcaccgacccgacaacccagcccgccaccuuacugaacaacaccaacaccacccccaccuauaacaccuuaaaguacaaccuguccacccccuccccccccacccggaacaucacaaacaacgacacgcagagagagcuggccgaaagcgagcagacaaaugcucagcugaauaccacccuggaccccaccgagaaccccacaaccggccaggacaccaauuccacaaccaacaucauaaugaccaccagcgacaucaccagcaagcacccgaccaacagcuccccugauaguagccccaccaccagaccacccauauacuucagaaagaagcggagcaucuucuggaaagaaggcgauaucuuucccuuccuggacggccugaucaauacggagaucgacuucgaccccauccccaacaccgagacgaucuucgacgagagccccagcuucaacaccuccacaaaugaagaacagcacaccccgcccaacauuucucugaccuucagcuacuuccccgacaagaacggcgacaccgccuacuccggcgagaacgagaaugacugcgaugccgaacugcggauuuggagcguacaggaagaugaccuggccgcuggccugagcuggauaccuuuuuucggcccuggcaucgagggccuguacaccgccgggcugaucaagaaucagaacaaccucgugugccggcugcggagacuggccaaucagacagccaaaagccuggaacugcugcuaagagugaccaccgaggaaagaaccuucucccucaucaaccggcaugccaucgacuuucugcugaccagauggggaggcacaugcaagguacugggccccgauugcugcaucggaaucgaggaucugagcaagaacaucuccgaacagaucgacaagauccggaaggaugagcagaaagaggaaaccggcuggggccugggcgggaagugguggacuucugauuggggcgugcucaccaaccugggaauccugcugcuccucucuaucgccgugcugaucgcccuuagcugcaucugccggauuuucaccaaguacaucggc

SEQ ID NO: 140 - RNA, 2049 nt, Artificial Sequence
  Synthetic polynucleotide
auggaaaccccugcccagcugcuguuccugcugcuauuguggcugccugacaccacaggccugcccauccuggaaaucgccagcaaugaccagccgcagaauguugacagcgugugcagcggcacucugcagaaaaccgaggacgugcaccugaugggcuucacccugagcggacagaagguggcugacagcccucuggaagccagcaagagaugggccuucagaaccggagugcccccuaagaauguggaguacaccgagggcgaggaagccaagaccuguuacaacaucagcgugaccgaccccagcggcaagucucuguuguuagacccuccuaccaaugugcgggacuaccccaagugcaagaccauucaucacauccagggccagaacccccacgcccaaggaauugcucugcaccuguggggagccuuuuuccuguaugaccggaucgccuccaccaccauguaccggggcaagguguucacagagggcaauaucgccgccaugaucgugaacaagaccgugcacaagaugaucuucagcagacaaggccagggcuaccgacacaugaaccugaccagcaccaacaaguacuggaccagcagcaacggcacccagacgaacgacaccggcugcuucggaacccugcaggaguacaacuccaccaagaaccagaccugcacccccuccaagaccccgccuaguccuccuacagcgcaccccgagaucaagcccaccucaaccccuaccgaugccacaagacugaacacgaccaaccccaacagcgacgacgaggaccucaccacaagcggcucuggauccggagagcaggaacccgauacaaccucugacgccgugaccaagcagggccuuagcagcacuaugcccccaaccccuuccccucagccuggcacaccucagcagggcggcaacaacacaaaccacucucaagaugccgccaccgagcuggacaacucaaauaccacagcccagccccccaccccaucacacaauacgaccacaaucuccacaaacaauaccagcaagcauaaccugucuacccuguccgagcugccucagaacaccacaaauccuaacacgcagagcauggccacagagaacgagaagaccagcgcgagccccaaaaccacgcucccuccaacagagagccccaccaccgaaaagagcacaaauaauaccaaguccccaacgaccauggaacccaacaccacuaacggccacuuuaccagcccuagcucgacgcccaauagcaccacccagcacuuaauauacuuucggcggaagcggagcauccuguggcgggagggcgacauguuccccuuccuggacggccugauaaacgcccccaucgacuucgaccccgugcccaacacuaagaccaucuucgacgaaagcagcagcuccggcgccagcgccgaagaagaucagcacgccagcuccaacaucucccugacccugucuuaccugccccacaccagcgaaaacacagccuacuccggcgagaaugagaacgacugcgacgccgaacugcggauuuggagcguucaagaagaugaccuggccgcuggccugagcuggauaccuuuuuucggcccuggcaucgagggacuguacaccgccggacugaucaagaaucagaacaaccucgucugccggcugcggcggcuggccaaucagacagccaaaagccuggaacugcugcugagagugaccaccgaggaacggaccuucucccuuaucaaucggcacgccaucgauuuucugcugaccagauggggcggcacaugcaaagugcugggccccgauugcugcaucggcauugaggaccugucccggaacauuuccgaacagaucgaucagaucaaaaaggacgagcagaaagagggcacgggcuggggacugggcggaaagugguggacaucugacuggggaguccugaccaaucugggaauacuucugcugcucucuaucgccgugcugauugcccucagcugcaucuguagaaucuucaccaaguacaucggc

SEQ ID NO: 141 - RNA, 2217 nt, Artificial Sequence
  Synthetic polynucleotide
auggacaguaggccccagaagaucuggauggcaccaucucucacugagagugauauggacuaucauaagauccugacggcagggcugagcgugcagcaaggcaucgucaggcagcgggugaucccaguauaucaggucaacaaccuugaggagauuugucaacugauaauucaggccuuugaagccggcgucgacuuucaagaaagugcagauagcuuucuccugaugcuguguuugcaccaugcguaccagggcgacuauaagcuguuccuggagucuggggcuguuaaguaccuggaggggcacgguuucagguuugaggugaagaagcgggacggcgucaagagguuagaggaacugcugccagcagugagcucugguaagaauauuaaaaggacccucgcugcaaugccggaggaggaaaccacagaggcaaacgcuggccaguuccugagcuucgcaucucuuuuucuaccgaagcuagugguaggagaaaaagcuugccucgaaaagguacagagacagauccagguucacgcugaacaggggcuuauccaguacccaaccgcuuggcagucggugggucacaugauggugauuuucagacugaugcggacaaauuuucugauuaaguuccugcuuauucaccaggggaugcauaugguggcaggccacgaugcaaaugacgccguaaucucuaauagcguugcucaagcgcgcuucucugggcugcugaucgugaaaacagugcuggaucauaucuuacaaaagacugagaggggugugaggcugcacccccuggcuagaaccgcaaaggucaagaaugaagugaauucguuuaaggcugcccucucuucacucgccaaacacggggaguacgcgccuuucgcaagacugcugaaccuuucaggggugaacaaucuugagcauggauuguuuccacaguuguccgccauugcacugggcguggcaacagcacacggguccacucuggccggugugaacguuggggagcaguaucaacagcucagggaagcugccacugaggccgagaaacagcuccagcaguacgccgagucccgcgaauuggaucaccucggccucgacgaccaggaaaagaagauucugaugaauuuucaucaaaaaaaaaacgagauuucauuucaacagaccaacgcaauggugacucuuagaaaagagcgccuagccaaauuaacggaggccauaaccgcagccagccuaccaaagacaucugggcacuacgacgacgacgacgacaucccguuucccgguccaauuaaugacgacgacaaucccggccaccaagacgacgacccaacugacucgcaggacaccacgauucccgaugucgugguggaccccgaugacgggagcuacggagaauaucaaagcuacucugagaacggcaugaaugcacccgacgaucuggugcuguuugacuuggacgaggacgaugaagauacuaagcccgugcccaauaggucaacuaaaggcggccagcagaaaaauucccaaaaggggcagcacaucgagggcagacaaacacaauccagaccuauacagaaugugccuggaccccaccgcacuauucaccacgcaagugcuccucugaccgacaaugaucgcaggaaugagccaucugguuccacaucuccgagaaugcuuacaccuaucaacgaagaggccgacccgcucgacgaugcggacgacgagaccucuaguuugccuccucuugagucagaugacgaagaacaggaccgggauggaacaucgaauagaacuccuacaguggcuccgcccgcuccaguauaccgcgaucacagugagaagaaggagcugccacaggaugaacaacaggaccaggaucacacccaagaagcacguaaccaggacucggauaacacucagucagaacacucuuuugaggagauguaucggcacauucuucgaucgcaagguccauuugacgcaguccucuacuaccacaugaugaaggaugaacccgucguuuuuuccacaagcgaugggaaagaguauacauacccggauuccuuggaggaggaguacccgcccuggcugacagagaaagaggcgaugaacgaggagaaccgcuuuguaacucuggacggucagcaauuuuauuggcccguuaugaaucacaagaacaaguucauggcuaucuugcaacaucaccag

SEQ ID NO: 142 - DNA, 92 bp, Artificial Sequence
  Synthetic polynucleotide
tcaagcttttggaccctcgtacagaagctaatacgactcactatagggaaataagagagaaaagaagagtaagaagaaatataagagccacc

SEQ ID NO: 143 - DNA, 119 bp, Artificial Sequence
  Synthetic polynucleotide
tgataataggctggagcctcggtggccatgcttcttgccccttgggcctccccccagcccctcctccccttcctgcacccgtacccccgtggtctttgaataaagtctgagtgggcggc

SEQ ID NO: 144 - DNA, 57 bp, Artificial Sequence
  Synthetic polynucleotide
gggaaataagagagaaaagaagagtaagaagaaatataagaccccggcgccgccacc

SEQ ID NO: 145 - DNA, 2168 bp, Artificial Sequence
  Synthetic polynucleotide
gggaaataagagagaaaagaagagtaagaagaaatataagaccccggcgccgccaccatggagactccagcccagctgctgttcttactcttactctggctgcctgataccacgggaataccgttaggcgttattcataattcgacactccaggtgtcagacgtggataagctggtctgccgcgataagctgagtagtacgaaccagctgagatccgtcggtctaaaccttgagggaaatggtgtggccactgacgtccccagcgcgaccaagcggtgggggttcaggtctggtgtcccacctaaagtagtgaactacgaagcaggtgagtgggcagaaaactgctacaacttagaaatcaaaaagccagatggatctgaatgcctgcccgccgcgccagatgggatccgcggcttcccaaggtgccgctacgtacacaaggtgagcggaaccgggccttgtgccggggatttcgcttttcataaagagggggcgttctttttgtatgatagattggcgagcaccgttatctaccgcggtaccaccttcgccgaaggcgtggtggcctttcttatcctgcctcaggccaaaaaggacttcttctccagtcacccgttgcgcgaacccgtcaatgctaccgaggacccatcttcaggatactattccaccactatacgctatcaggccacaggcttcgggaccaatgaaactgagtacctctttgaggtcgacaaccttacatatgtccaactcgaatcacgcttcactcctcaatttctgcttcagttgaacgagacaatatatacatcaggcaagcgatctaatactaccggcaagctgatatggaaggtgaatccagagatcgataccacaatcggcgagtgggccttttgggagactaagaaaaacttgactcgcaaaatccggagtgaggagctgagtttcactgtggtgtctaatggtgcgaagaatataagcggccaatcccctgctaggacctcttcggatcccggtacgaacacaacaactgaggaccacaagattatggccagcgaaaattctagcgcaatggtacaggtgcattcacagggccgggaggcggcagtctctcacctaacgacactggcgaccatatcgacctctccacagtcactgacaactaagcctggacccgataattccacacacaacacccccgtctacaagttagatatatctgaggcaactcaagtagaacaacatcaccggcgcacagacaatgactccaccgcctctgacacccctagcgccactacggcagcagggccacctaaggcagagaacaccaacacatcgaaatcaaccgactttctggacccggcaactaccacatctccccagaatcattcagaaacagccggaaacaataatacacatcaccaagatacaggcgaggagagtgccagctccggaaagttgggtctcataaccaacacaattgctggcgttgccggccttatcacaggtggcagacggacaaggagagaagctattgtgaacgcccagcctaagtgcaacccaaatctccactactggacgacacaggatgaaggggcagcgatcgggctggcctggataccttactttggacccgcagcagagggcatctatatcgagggcttgatgcacaaccaagacgggctgatctgcggcctgcgccagctggccaacgaaactacacaggccctgcagctgtttctgcgggctacaactgagctccggacttttagtattctgaatcgaaaggccatagatttccttctgcagagatggggtggcacatgtcacatccttggccccgattgctgcatcgaaccccacgattggacaaaaaacattaccgataagatagaccagatcatacacgatttcgttgacaagacattgcccgaccaaggagataatgacaattggtggacaggatggaggcagtggataccagctggcataggcgtgaccggggtcatcatcgcagtgattgccttgttttgcatttgcaagttcgtgttctgataataggctggagcctcggtggccatgcttcttgccccttgggcctccccccagcccctcctccccttcctgcacccgtacccccgtggtctttgaataaagtctgagtgggcggc

SEQ ID NO: 146 - DNA, 2210 bp, Artificial Sequence
  Synthetic polynucleotide
gggaaataagagagaaaagaagagtaagaagaaatataagaccccggcgccgccaccatggagacccccgctcagctcctgtttctgctcctgctatggttaccagatacaactggtattccgctcggtgttatacacaattccacactccaggtctcagatgtagataaattagtttgtcgggataaactgtctagtaccaatcagcttaggtctgtcggtcttaatctcgaaggaaacggcgttgccaccgatgtgcctagcgctacgaagagatggggctttcgaagcggagtgcccccaaaggtggtcaactatgaagctggagaatgggccgagaactgctataacctcgaaataaaaaagcctgacggctctgagtgtctgccagccgccccagatggaattagagggtttccacgatgcaggtacgtacataaagtcagcggcaccggtccatgcgcgggcgactttgcatttcacaaagagggagccttcttcctatacgacaggttagccagcacagtgatatacagggggactacgttcgctgagggcgtcgttgcatttttgattctaccacaagcaaaaaaagactttttcagttctcatcctctgcgagaacccgtaaatgctactgaggacccctcctcaggctactattctaccacaattcgttatcaggcgacaggctttggtactaatgaaaccgagtatcttttcgaagtagacaatctgacgtacgtgcagctcgaatcacgtttcaccccacaattcctcctgcaactcaacgagacaatctatacatccggtaaacgcagtaacactactgggaaactcatctggaaggtgaatcctgagatagacactactatcggcgagtgggcattttgggaaaccaaaaaaaatctgactcgtaagattagatcagaagagttatcctttactgtcgtcagtaatggagccaaaaacatcagtgggcagtccccggctcggacgagctccgaccccggcaccaatacaactactgaagatcataagatcatggcatccgaaaatagttccgccatggtacaggtgcacagccagggcagagaagccgctgtctcacaccttactacgctggctactataagcacctcgcctcaatccctgaccacaaagcctggtcccgacaactccacccataacacccctgtttacaagctggacattagcgaagcaactcaggtcgaacagcatcacaggcgtacagataacgatagcaccgcaagtgataccccatctgccacgaccgccgccggaccccctaaggcagagaacaccaacacatcgaagtcaacagattttcttgacccagccactaccacatcaccccagaatcactctgaaactgctggcaacaataatactcatcaccaggatactggcgaagagagcgccagctctggcaaactgggattgattacaaacacgattgcaggagttgccggtctcatcaccggaggtagaagaacccgccgggaggctattgtgaacgcccagccaaagtgtaaccctaaccttcattactggaccactcaggatgaaggagctgcaattggcctcgcctggattccctacttcggaccagccgccgagggtatttacatcgagggcctcatgcataaccaggatggcctgatctgcggcctaaggcagttggccaacgaaacgacgcaagcgctccagttatttcttcgagcaactacagaactacgcactttttcaatcctgaaccgaaaagccatcgactttctcctgcagagatggggcggcacttgtcacattctggggcctgattgttgtatcgagccacatgactggaccaaaaatatcacggacaagatcgatcagatcattcatgactttgtggataaaacactgccagaccaaggggataacgataactggtggactggctggcggcagtggatccccgcaggtattggggtcactggagtaattatcgccgtgattgctctgttttgcatttgcaagttcgttttcggtaaacccattccaaatcccctactaggcctggacagcacatgataataggctggagcctcggtggccatgcttcttgccccttgggcctccccccagcccctcctccccttcctgcacccgtacccccgtggtctttgaataaagtctgagtgggcggc

SEQ ID NO: 147 - DNA, 2090 bp, Artificial Sequence
  Synthetic polynucleotide
gggaaataagagagaaaagaagagtaagaagaaatataagaccccggcgccgccaccatggaaacaccagcccagctgctgtttctcctgctgttgtggttgccagacactacaggaatcccccttggtgtgattcataactccacgcttcaagtgtcggatgtagacaaacttgtgtgtcgggataagctttcgtctacaaaccaattaagatcggtgggactgaacctggaaggaaatggagtggccactgacgtcccctccgcgaccaaacggtggggatttcggtcaggcgtgccccccaaagtcgtcaattacgaggccggagagtgggcagaaaactgttataacctcgaaatcaagaagcccgatggatcggaatgcttgccggcagcccctgacgggatccgcgggttcccgaggtgcagatacgtgcacaaagtctccggcaccggaccttgcgccggcgacttcgcgtttcacaaagaaggcgcattttttctgtacgatcgacttgcaagcactgttatatatagagggacgacattcgctgaaggcgttgtggcatttctgatactgccccaagctaaaaaggatttttttagctcacatccactacgggaaccggtcaatgctactgaagatccatcaagcggctattattcaaccaccataaggtatcaggcgacaggttttggcactaatgaaaccgagtacctctttgaagtagacaatctcacttacgtgcaacttgagtcccgatttacccctcagtttctgctgcaattaaacgagactatttacacttccggcaaaaggagtaacacgacaggcaaactgatctggaaggtcaaccctgagatcgataccacgattggcgagtgggcattctgggagactaaaaaaaacctgaccaggaagatacggtccgaagagctgtctttcacagtcgttagcaacggtgccaagaacatttccggccagtcccctgcccggacctcgagtgatcccggaaccaatacgacaaccgaggatcataagatcatggccagcgaaaatagcagcgcaatggtacaagttcattcccaagggcgagaagccgcggtgtcccacctgactactctggccactatttccacaagccctcagtcgttaacaaccaaacctgggcctgacaattcaacccataacacacctgtatataagctggatatttcagaggcaacccaagtggaacagcaccataggagaacggacaatgactctacagcctccgacaccccctctgcaacgaccgctgccggaccacccaaggctgaaaacaccaacacatccaagagtaccgattttttggacccggcgaccactacgagtcctcagaatcacagtgaaacggcagggaataacaacacccaccatcaggatacgggcgaagagtctgccagttctggcaagttggggctcatcacgaacaccattgccggggtggctggtcttatcactggaggtcgcaggacgagacgtgaggctatagtgaacgcacagccaaagtgtaatcccaaccttcattactggaccacacaggacgagggagctgcaattgggttggcctggatcccttactttggacccgcagccgaaggcatctacatcgaaggcctaatgcacaatcaggacggccttatctgcggattgcgacagcttgccaatgaaacaacccaggctcttcaactgtttctaagagccacaactgagttgaggacttttagcatcttgaataggaaagccatagacttcttgttacagaggtgggggggcacatgtcacatcctcggacccgactgttgtatagagcctcatgactggaccaagaacatcacagataagattgaccagattatccatgattttgtcgataaaacacttcccgaccaaggggataatgataactggtggaccggctggcgccagtgataataggctggagcctcggtggccatgcttcttgccccttgggcctccccccagcccctcctccccttcctgcacccgtacccccgtggtctttgaataaagtctgagtgggcggc

SEQ ID NO: 148 - DNA, 2447 bp, Artificial Sequence
  Synthetic polynucleotide
gggaaataagagagaaaagaagagtaagaagaaatataagaccccggcgccgccaccatggaaacgccagcacaattactttttctgcttttgctgtggctccctgacacaactggacatcaccaccatcatcatggcaaacctatacctaaccctctgctgggtctggactctaccggtgattggaaatgggatggaggcctggtccctcggggctctgatgagatgttgcgagagctgcaggagactaacgcagcactccaggacgtccgcgaacttctccgacagcaggttagacagatcaccttccttagatgtttacttatgggggggagactgctctgcagattggaagagctggagaggcgtctggaagagctggagcggcgccttgaggaactggaacgggccattaatacagttgatgagttggccgccttgaggagacgtctggaggaactagcacgcggctctatacctctaggggttatccataattccacgctccaggttagtgacgttgacaagctggtgtgccgcgataaattatcttccacgaaccagttgagatccgttggactaaatcttgagggaaacggcgttgccacagacgtgccatctgccaccaaaaggtggggtttccgctccggtgtgccccccaaagtggtgaattacgaggcaggggaatgggcggaaaactgttacaatctggaaattaagaagcctgacggcagtgagtgtctgccggccgctcctgacggaataagagggttcccaaggtgtagatacgtgcacaaggtctctggaaccggaccttgcgccggggacttcgccttccacaaagaaggtgcatttttcctatatgaccgcttagcctcgacagtgatttacaggggcaccactttcgcagagggggtagtcgctttcttaattttgcctcaggcgaaaaaggactttttttctagtcaccccctcagggagcctgtaaacgcaaccgaggacccaagtagcggttactactccacaacgatcaggtaccaggccaccggatttggcacaaacgaaacggaatacctatttgaagtcgacaacctgacctacgtccagctggagtcccgattcacgccccagttcctactgcagctgaatgagacaatttacacttctggtaaaagaagtaacaccactggaaaactcatctggaaggtcaatccagaaattgatacaacaatcggtgagtgggctttttgggagacgaaaaaaaacttgaccagaaaaatcaggtccgaggagctgagtttcacggtagttagcaacggagcgaaaaatatctcaggacagagtccagcccgaacctcttcggatccaggcactaatacgacaacagaagaccataagattatggctagtgagaactcatctgctatggtccaggtgcactcgcaaggacgcgaagcagctgtgtcacatctgaccacccttgcaactatcagcacaagtcctcagagcttaaccaccaagcctggtcccgacaattctacacacaatactcctgtttacaaattagacatcagtgaagccacccaggttgaacaacaccaccggcggacggacaatgactcaacggcatctgacaccccatccgccacaacggctgccgggccaccaaaagctgagaataccaacacatcaaagtcaaccgacttcttagaccccgctacaaccacctccccccaaaatcattccgaaactgccggtaacaacaacacccaccaccaggataccggggaggaaagcgccagcagcggcaagctaggcctgatcacaaacacaatcgccggggtcgcaggcctaatcaccggaggcagacgtacacgtcgggaggctattgttaatgcccagcctaaatgcaatccgaatcttcattattggaccacccaggatgaaggagctgccattggactggcttggatcccttactttggccccgccgctgagggaatttatatagaggggctgatgcacaaccaagatggactaatttgtggactccgccagctggccaatgaaaccacccaagctttacaactctttctgagagcaacaacagaacttcggacattttctatattgaatagaaaggctattgatttccttctccagagatggggtggtacctgccacatactcggtccagattgttgcatagaacctcatgactggaccaaaaatattactgacaaaatcgatcagatcattcacgatttcgtggataagacattacccgaccaaggcgacaacgacaactggtggactggatggaggcagtgataataggctggagcctcggtggccatgcttcttgccccttgggcctccccccagcccctcctccccttcctgcacccgtacccccgtggtctttgaataaagtctgagtgggcggc

SEQ ID NO: 149 - DNA, 2204 bp, Artificial Sequence
  Synthetic polynucleotide
gggaaataagagagaaaagaagagtaagaagaaatataagaccccggcgccgccaccatgggagtcaccggcattctgcagctccccagggatcgtttcaaaagaacttccttttttctgtgggtaatcatcctgttccaaaggacgttttccatccccctgggagttatacacaacagtacattgcaggtctctgacgtagacaaactcgtctgccgggacaaactttctagcactaatcagctgcggtcggtaggtctgaacttggaaggtaatggtgtcgccacagatgtgccatccgccaccaaacgctgggggttccggtcaggcgtgcccccaaaagtcgtcaactatgaagcaggcgaatgggcggaaaactgttataatctcgagatcaaaaaacctgacgggtccgagtgtttgcccgccgctcctgacggcatcagaggcttccctaggtgcagatatgtccacaaggtatcaggtaccggcccatgtgctggggacttcgctttccacaaggaaggagctttctttctctacgacaggctggcctctaccgtcatatataggggaactaccttcgccgaaggcgttgttgcctttttgatcctgcctcaggccaaaaaagacttcttttcttcccatcccctgcgggagccagttaacgctaccgaggacccgagctctggctattacagtaccaccatccggtatcaagctaccggattcggcacgaacgaaaccgagtacctattcgaggtggacaacctgacatatgttcaactggagtcccggttcaccccccagtttctgctgcagttgaacgagaccatctacacaagcggtaaaaggtctaataccactggaaaactgatctggaaagtaaacccggagatagataccaccattggagaatgggcattctgggagaccaagaaaaatttgaccaggaaaatacgctctgaagaactgtcctttacggtggtgtctaatggggcgaagaacatctccggacagagccctgcgcgcacatcctcagatccaggcacaaataccacaacagaggatcacaagattatggcatctgagaatagcagcgctatggtgcaggttcacagccaaggcagagaggccgcggtttcccatctcacaacattggctactatcagcacctctcctcaaagcctgacaacaaagcctggtccagataattctacccataatactccagtgtataaactcgacatttctgaggctacacaagtggagcagcaccatagaagaacagacaacgactcaactgcctccgacaccccttcagcgacaaccgccgccggccctcctaaggcggaaaacactaatacttcgaaatcaaccgattttctggatccagcgaccaccacctcgcctcagaatcattcggaaacggctggaaataataacacccaccaccaggacaccggcgaagaaagtgccagcagtggcaagctcgggctgatcaccaatactatcgcgggggtggccgggctaattacaggcggcagacggaccaggagagaggccattgtaaacgcccagcctaaatgcaaccccaacctgcattactggaccacccaagacgagggcgccgcaattggtttggcttggatcccctattttggacccgccgccgaagggatttatatcgaaggactgatgcacaaccaggatggccttatttgtgggcttcggcagctggccaatgagacgacacaagcgctgcagttattcttgagagccactaccgagcttaggaccttcagcattctgaatcgcaaggccatcgacttcctgttgcagcgatgggggggtacctgccatattctgggccctgattgctgtatagaaccccacgactggacgaagaatataaccgataaaatagatcagatcatccacgactttgtcgacaaaacactcccagatcagggcgataacgataattggtggaccggctggaggcagtggatcccagcaggaatcggggtgacaggcgttattatcgcggtcatagcactgttttgcatctgcaagttcgtcttttgataataggctggagcctcggtggccatgcttcttgccccttgggcctccccccagcccctcctccccttcctgcacccgtacccccgtggtctttgaataaagtctgagtgggcggc

SEQ ID NO: 150 - DNA, 2246 bp, Artificial Sequence
  Synthetic polynucleotide
gggaaataagagagaaaagaagagtaagaagaaatataagaccccggcgccgccaccatgggggtgacagggatattgcagctgcctcgggatcgcttcaagcgcacctccttttttctgtgggtcatcatcctctttcagcgcacatttagcattccgctcggcgtaattcataattcaactctacaagtctctgacgtggacaaattggtctgccgggacaagttgtcttcgacaaaccaattgaggtctgtagggctgaacctcgagggcaatggtgtggcgacggatgtaccctcggccaccaagcgttggggctttaggtctggcgtcccccctaaagtggtgaactatgaagctggggaatgggccgaaaattgctacaatctggaaattaagaaacctgacggaagcgagtgtctcccagctgccccagacggtatccgcgggttccccagatgcaggtacgttcataaagtgagtggaaccggcccatgcgccggagatttcgcattccacaaggaaggtgctttctttctttacgacaggctagcctccacagtgatctatcgcggcaccaccttcgcagagggcgtggttgcctttttgatcctgcctcaggccaaaaaagacttcttcagttctcaccctctgagggaaccagtgaacgccaccgaggacccttccagcggatactacagcaccacgatccgctatcaagcgaccggtttcgggaccaacgagactgagtacctctttgaagtggataacctgacatatgtgcagctggaatctcggtttaccccgcagttccttctccagctgaatgaaactatatacacctcaggcaagagatccaataccacaggtaaattgatttggaaagttaatcccgaaatcgacacaacgattggggagtgggccttttgggagaccaagaaaaatctgacacgcaagatcagaagtgaggagttgagtttcaccgtggtcagcaatggcgcgaaaaatatttccggtcaatctccagccaggactagctctgaccctggaacgaacactaccacagaagaccataagatcatggcaagtgagaattcttccgctatggttcaggtgcactcccagggccgggaagccgccgtctcacacctgacaaccctcgccacaatctccacttccccacagtccctgacaaccaaacccgggcctgacaactcaacacataatacgccagtttacaagctcgatatctctgaggctacccaggtggagcaacaccacaggcggactgacaacgacagcaccgctagtgataccccctcagccaccactgccgcaggtccccccaaggccgaaaatacaaataccagtaaaagtacggacttcctggaccccgcaactacaacctccccccaaaaccacagcgaaacggcagggaataataatacacaccatcaggataccggagaggagtccgcttcttccggcaagctgggactgataaccaacacaattgccggagtggcaggtctgattacgggagggcgcaggactagacgggaagcaatcgtgaacgcacagccaaagtgcaatcctaacctgcactactggactacccaagatgaaggggcagccattgggcttgcatggatcccctactttgggcctgcagcggaggggatttatatcgaaggcctgatgcataatcaggatggattgatttgcgggctcaggcagttggcgaatgaaacaacacaagccctacaattatttctgagggccactactgagttgcgaacatttagtatcctcaatagaaaggccatagacttcctgctccagcgctggggcgggacttgccacattctaggcccggactgttgtatcgaaccccatgactggaccaagaacataactgataagatagaccagatcatccatgatttcgttgataaaacactgcccgatcagggtgacaacgacaattggtggactggctggaggcagtggatcccagctggcattggggttacaggtgttataattgccgtgattgctctcttctgcatctgcaaatttgtcttcggtaaaccaatacccaatccactgctgggcctggatagcacgtgataataggctggagcctcggtggccatgcttcttgccccttgggcctccccccagcccctcctccccttcctgcacccgtacccccgtggtctttgaataaagtctgagtgggcggc

SEQ ID NO: 151 - DNA, 2126 bp, Artificial Sequence
  Synthetic polynucleotide
gggaaataagagagaaaagaagagtaagaagaaatataagaccccggcgccgccaccatgggagtgactggcattcttcagcttcctcgcgacaggtttaagagaacctcgttcttcctgtgggtcattatacttttccagcgcacattcagcatcccacttggagtgattcataattctacacttcaggttagcgacgtggacaagctggtctgccgggacaaactgtcgtcaacaaatcagcttaggtccgtaggcctgaaccttgaaggtaacggcgttgcaacagatgtgcctagcgcaacgaagcggtggggatttaggtctggtgttccaccaaaagtggtcaattacgaggccggagagtgggcagagaactgctataacctggaaataaaaaagcctgacggtagcgaatgcctgccagccgcgccagatggcattcgggggtttccccgctgtcgctacgtccacaaagtaagtggtactgggccttgtgccggtgacttcgcctttcacaaagagggcgcgttctttttgtatgaccgtctcgcctccacagtaatttaccgaggcactacatttgcagaaggggtggtggcattccttatattaccccaggctaaaaaggacttcttctctagccacccactccgggaaccagtgaatgcaaccgaggatccaagctcggggtactattctaccactatcaggtatcaggcaacagggtttggtacaaatgagactgaatatctcttcgaggttgacaacctgacctacgtgcagctggaaagtcgtttcactccgcagttcctcttgcagctcaatgagaccatatataccagtgggaaacggtctaacacaaccggaaaactgatttggaaagttaacccagaaattgatactacgattggtgagtgggcgttttgggagacaaagaagaatttaactaggaagatcaggtccgaagaactgtcattcactgtggtgtctaacggcgcgaaaaatatctctgggcagtctccagcccgcacatcctccgatcctggaacgaatacaaccaccgaagatcataagatcatggccagcgaaaactcctccgccatggtccaagtccattcccaagggagggaagctgcagtctcccacctcactactttggcaaccattagcacttcgccacaaagcctgaccaccaagcccggcccggataattcaacccacaacaccccagtttataaactggatatcagtgaggcgactcaggtggagcagcatcaccgaagaactgataatgattctactgccagcgacaccccaagcgcgaccaccgctgccggacctcccaaggccgagaatactaacacttcgaaatcaacagactttctggatcccgccacaaccacgtccccacagaatcactctgaaaccgccggtaacaataatacacatcaccaggataccggggaggaatccgcttctagcgggaagctgggccttataacaaatacgatagcaggggtggccggactcatcacagggggtcggaggacacggcgggaggctatagtcaatgctcagcctaaatgcaacccgaatctgcactattggaccacacaggacgagggagccgccatcgggctggcatggattccatatttcggcccagccgctgagggcatctacatcgagggtcttatgcacaaccaggacgggctaatctgcggacttaggcagctggccaacgagacaacacaggcactccagctcttccttcgcgctacaacagagctacggaccttttccattctcaacaggaaggccatagacttcctcttgcagcggtggggaggcacctgtcatattctcgggcccgattgttgtatcgaacctcatgattggaccaaaaatattacagataagattgatcaaatcatccacgatttcgtagataagacactccccgaccagggagacaatgacaactggtggacggggtggcgacagtgataataggctggagcctcggtggccatgcttcttgccccttgggcctccccccagcccctcctccccttcctgcacccgtacccccgtggtctttgaataaagtctgagtgggcggc

SEQ ID NO: 152 - DNA, 2168 bp, Artificial Sequence
  Synthetic polynucleotide
gggaaataagagagaaaagaagagtaagaagaaatataagaccccggcgccgccaccatgggcgtgactgggatcctccaactgcctcgcgatagattcaagcgaactagtttctttctatgggtcatcatactcttccagcgaaccttctcaattccactgggagtcattcacaactccaccttgcaagtgtcagatgtggacaagttggtatgccgagacaaactctcttctactaatcagctcaggtctgtggggctgaaccttgaaggtaacggcgtggccacagatgtgccttcggctactaagcgatggggtttccggtccggtgtgcccccgaaggtggtaaattatgaggctggcgagtgggccgaaaactgctataacttggagattaaaaagcctgacggtagcgaatgtttaccagccgctcccgatggaattaggggctttcccagatgtcggtatgtccacaaagtgtctggaactgggccttgtgctggggattttgccttccataaagaaggggccttctttctatacgatcggctggccagtaccgtcatttatcgaggcactactttcgccgaaggcgttgtggcgtttttgattctcccacaggccaagaaagacttcttttcctcacatcctctacgggagccagtaaatgcaaccgaagatccttctagtggctactactccaccactattcggtaccaggctaccggattcggcaccaatgagacagaatatttatttgaggtggacaaccttacttatgtgcagttggaaagcaggttcaccccccagttcctcctgcagttgaacgagacaatttatacatcaggtaagcggtctaacactaccggtaagttaatctggaaagtgaaccccgagatcgacacgaccatcggggaatgggctttttgggagaccaagaaaaacctgacgcgcaagattagatccgaggagctcagtttcactgtggtgagtaatggcgctaaaaatatcagtgggcagagccccgcccggacaagcagcgaccctgggacaaacactacaaccgaagaccacaaaataatggcctcagaaaacagtagcgcgatggtgcaagtgcatagccaaggacgcgaagccgctgtatcccatcttaccaccctggctacgattagcacctcgccccagtctctgactacgaagccagggcctgacaattctacacacaacacacccgtgtacaaacttgacatctcagaagcaacgcaggtggaacagcatcaccgccggacggataacgacagcaccgcaagcgatacccccagtgctactactgcagccggtcccccaaaagcagaaaatacgaataccagcaagagtacagacttcttggacccggccaccacaacaagcccacaaaatcacagcgagactgcaggcaacaataacacacatcaccaggatacgggggaggaatctgcttcgtccggcaaactcggactgatcacaaatacgatcgccggggtggccggcttgatcaccggcggcaggcggactcggagagaagccatagtgaacgctcagcctaagtgcaatccgaatctacactattggactactcaggacgaaggcgcagctattggcttggcttggattccatactttgggccagcagcagagggaatatacatcgagggactgatgcataaccaggatggcctgatctgtggcctccgacagttggctaatgaaactacccaggccctccaattgttcctgcgcgctacaactgaacttcggaccttttctattttgaacaggaaggccatagatttcctgcttcagcgttggggcggaacatgccatatcctgggccccgactgttgtatcgagcctcatgattggacgaagaatataactgataaaatagatcaaataatccacgacttcgtcgacaagaccctgcctgaccagggggacaatgataactggtggactggatggcgacagggtaagccaatcccgaaccctcttctcggtctggatagcacgtgataataggctggagcctcggtggccatgcttcttgccccttgggcctccccccagcccctcctccccttcctgcacccgtacccccgtggtctttgaataaagtctgagtgggcggc

SEQ ID NO: 153 - DNA, 2393 bp, Artificial Sequence
  Synthetic polynucleotide
gggaaataagagagaaaagaagagtaagaagaaatataagaccccggcgccgccaccatggacagtaggccccagaagatctggatggcaccatctctcactgagagtgatatggactatcataagatcctgacggcagggctgagcgtgcagcaaggcatcgtcaggcagcgggtgatcccagtatatcaggtcaacaaccttgaggagatttgtcaactgataattcaggcctttgaagccggcgtcgactttcaagaaagtgcagatagctttctcctgatgctgtgtttgcaccatgcgtaccagggcgactataagctgttcctggagtctggggctgttaagtacctggaggggcacggtttcaggtttgaggtgaagaagcgggacggcgtcaagaggttagaggaactgctgccagcagtgagctctggtaagaatattaaaaggaccctcgctgcaatgccggaggaggaaaccacagaggcaaacgctggccagttcctgagcttcgcatctctttttctaccgaagctagtggtaggagaaaaagcttgcctcgaaaaggtacagagacagatccaggttcacgctgaacaggggcttatccagtacccaaccgcttggcagtcggtgggtcacatgatggtgattttcagactgatgcggacaaattttctgattaagttcctgcttattcaccaggggatgcatatggtggcaggccacgatgcaaatgacgccgtaatctctaatagcgttgctcaagcgcgcttctctgggctgctgatcgtgaaaacagtgctggatcatatcttacaaaagactgagaggggtgtgaggctgcaccccctggctagaaccgcaaaggtcaagaatgaagtgaattcgtttaaggctgccctctcttcactcgccaaacacggggagtacgcgcctttcgcaagactgctgaacctttcaggggtgaacaatcttgagcatggattgtttccacagttgtccgccattgcactgggcgtggcaacagcacacgggtccactctggccggtgtgaacgttggggagcagtatcaacagctcagggaagctgccactgaggccgagaaacagctccagcagtacgccgagtcccgcgaattggatcacctcggcctcgacgaccaggaaaagaagattctgatgaattttcatcaaaaaaaaaacgagatttcatttcaacagaccaacgcaatggtgactcttagaaaagagcgcctagccaaattaacggaggccataaccgcagccagcctaccaaagacatctgggcactacgacgacgacgacgacatcccgtttcccggtccaattaatgacgacgacaatcccggccaccaagacgacgacccaactgactcgcaggacaccacgattcccgatgtcgtggtggaccccgatgacgggagctacggagaatatcaaagctactctgagaacggcatgaatgcacccgacgatctggtgctgtttgacttggacgaggacgatgaagatactaagcccgtgcccaataggtcaactaaaggcggccagcagaaaaattcccaaaaggggcagcacatcgagggcagacaaacacaatccagacctatacagaatgtgcctggaccccaccgcactattcaccacgcaagtgctcctctgaccgacaatgatcgcaggaatgagccatctggttccacatctccgagaatgcttacacctatcaacgaagaggccgacccgctcgacgatgcggacgacgagacctctagtttgcctcctcttgagtcagatgacgaagaacaggaccgggatggaacatcgaatagaactcctacagtggctccgcccgctccagtataccgcgatcacagtgagaagaaggagctgccacaggatgaacaacaggaccaggatcacacccaagaagcacgtaaccaggactcggataacactcagtcagaacactcttttgaggagatgtatcggcacattcttcgatcgcaaggtccatttgacgcagtcctctactaccacatgatgaaggatgaacccgtcgttttttccacaagcgatgggaaagagtatacatacccggattccttggaggaggagtacccgccctggctgacagagaaagaggcgatgaacgaggagaaccgctttgtaactctggacggtcagcaattttattggcccgttatgaatcacaagaacaagttcatggctatcttgcaacatcaccagtgataataggctggagcctcggtggccatgcttcttgccccttgggcctccccccagcccctcctccccttcctgcacccgtacccccgtggtctttgaataaagtctgagtgggcggc

SEQ ID NO: 154 - RNA, 2168 nt, Artificial Sequence
  Synthetic polynucleotide
gggaaauaagagagaaaagaagaguaagaagaaauauaagaccccggcgccgccaccauggagacuccagcccagcugcuguucuuacucuuacucuggcugccugauaccacgggaauaccguuaggcguuauucauaauucgacacuccaggugucagacguggauaagcuggucugccgcgauaagcugaguaguacgaaccagcugagauccgucggucuaaaccuugagggaaaugguguggccacugacguccccagcgcgaccaagcgguggggguucaggucuggugucccaccuaaaguagugaacuacgaagcaggugagugggcagaaaacugcuacaacuuagaaaucaaaaagccagauggaucugaaugccugcccgccgcgccagaugggauccgcggcuucccaaggugccgcuacguacacaaggugagcggaaccgggccuugugccggggauuucgcuuuucauaaagagggggcguucuuuuuguaugauagauuggcgagcaccguuaucuaccgcgguaccaccuucgccgaaggcgugguggccuuucuuauccugccucaggccaaaaaggacuucuucuccagucacccguugcgcgaacccgucaaugcuaccgaggacccaucuucaggauacuauuccaccacuauacgcuaucaggccacaggcuucgggaccaaugaaacugaguaccucuuugaggucgacaaccuuacauauguccaacucgaaucacgcuucacuccucaauuucugcuucaguugaacgagacaauauauacaucaggcaagcgaucuaauacuaccggcaagcugauauggaaggugaauccagagaucgauaccacaaucggcgagugggccuuuugggagacuaagaaaaacuugacucgcaaaauccggagugaggagcugaguuucacuguggugucuaauggugcgaagaauauaagcggccaauccccugcuaggaccucuucggaucccgguacgaacacaacaacugaggaccacaagauuauggccagcgaaaauucuagcgcaaugguacaggugcauucacagggccgggaggcggcagucucucaccuaacgacacuggcgaccauaucgaccucuccacagucacugacaacuaagccuggacccgauaauuccacacacaacacccccgucuacaaguuagauauaucugaggcaacucaaguagaacaacaucaccggcgcacagacaaugacuccaccgccucugacaccccuagcgccacuacggcagcagggccaccuaaggcagagaacaccaacacaucgaaaucaaccgacuuucuggacccggcaacuaccacaucuccccagaaucauucagaaacagccggaaacaauaauacacaucaccaagauacaggcgaggagagugccagcuccggaaaguugggucucauaaccaacacaauugcuggcguugccggccuuaucacagguggcagacggacaaggagagaagcuauugugaacgcccagccuaagugcaacccaaaucuccacuacuggacgacacaggaugaaggggcagcgaucgggcuggccuggauaccuuacuuuggacccgcagcagagggcaucuauaucgagggcuugaugcacaaccaagacgggcugaucugcggccugcgccagcuggccaacgaaacuacacaggcccugcagcuguuucugcgggcuacaacugagcuccggacuuuuaguauucugaaucgaaaggccauagauuuccuucugcagagaugggguggcacaugucacauccuuggccccgauugcugcaucgaaccccacgauuggacaaaaaacauuaccgauaagauagaccagaucauacacgauuucguugacaagacauugcccgaccaaggagauaaugacaauugguggacaggauggaggcaguggauaccagcuggcauaggcgugaccggggucaucaucgcagugauugccuuguuuugcauuugcaaguucguguucugauaauaggcuggagccucgguggccaugcuucuugccccuugggccuccccccagccccuccuccccuuccugcacccguacccccguggucuuugaauaaagucugagugggcggc

SEQ ID NO: 155 - RNA, 2210 nt, Artificial Sequence
  Synthetic polynucleotide
gggaaauaagagagaaaagaagaguaagaagaaauauaagaccccggcgccgccaccauggagacccccgcucagcuccuguuucugcuccugcuaugguuaccagauacaacugguauuccgcucgguguuauacacaauuccacacuccaggucucagauguagauaaauuaguuugucgggauaaacugucuaguaccaaucagcuuaggucugucggucuuaaucucgaaggaaacggcguugccaccgaugugccuagcgcuacgaagagauggggcuuucgaagcggagugcccccaaagguggucaacuaugaagcuggagaaugggccgagaacugcuauaaccucgaaauaaaaaagccugacggcucugagugucugccagccgccccagauggaauuagaggguuuccacgaugcagguacguacauaaagucagcggcaccgguccaugcgcgggcgacuuugcauuucacaaagagggagccuucuuccuauacgacagguuagccagcacagugauauacagggggacuacguucgcugagggcgucguugcauuuuugauucuaccacaagcaaaaaaagacuuuuucaguucucauccucugcgagaacccguaaaugcuacugaggaccccuccucaggcuacuauucuaccacaauucguuaucaggcgacaggcuuugguacuaaugaaaccgaguaucuuuucgaaguagacaaucugacguacgugcagcucgaaucacguuucaccccacaauuccuccugcaacucaacgagacaaucuauacauccgguaaacgcaguaacacuacugggaaacucaucuggaaggugaauccugagauagacacuacuaucggcgagugggcauuuugggaaaccaaaaaaaaucugacucguaagauuagaucagaagaguuauccuuuacugucgucaguaauggagccaaaaacaucagugggcaguccccggcucggacgagcuccgaccccggcaccaauacaacuacugaagaucauaagaucauggcauccgaaaauaguuccgccaugguacaggugcacagccagggcagagaagccgcugucucacaccuuacuacgcuggcuacuauaagcaccucgccucaaucccugaccacaaagccuggucccgacaacuccacccauaacaccccuguuuacaagcuggacauuagcgaagcaacucaggucgaacagcaucacaggcguacagauaacgauagcaccgcaagugauaccccaucugccacgaccgccgccggacccccuaaggcagagaacaccaacacaucgaagucaacagauuuucuugacccagccacuaccacaucaccccagaaucacucugaaacugcuggcaacaauaauacucaucaccaggauacuggcgaagagagcgccagcucuggcaaacugggauugauuacaaacacgauugcaggaguugccggucucaucaccggagguagaagaacccgccgggaggcuauugugaacgcccagccaaaguguaacccuaaccuucauuacuggaccacucaggaugaaggagcugcaauuggccucgccuggauucccuacuucggaccagccgccgaggguauuuacaucgagggccucaugcauaaccaggauggccugaucugcggccuaaggcaguuggccaacgaaacgacgcaagcgcuccaguuauuucuucgagcaacuacagaacuacgcacuuuuucaauccugaaccgaaaagccaucgacuuucuccugcagagauggggcggcacuugucacauucuggggccugauuguuguaucgagccacaugacuggaccaaaaauaucacggacaagaucgaucagaucauucaugacuuuguggauaaaacacugccagaccaaggggauaacgauaacugguggacuggcuggcggcaguggauccccgcagguauuggggucacuggaguaauuaucgccgugauugcucuguuuugcauuugcaaguucguuuucgguaaacccauuccaaauccccuacuaggccuggacagcacaugauaauaggcuggagccucgguggccaugcuucuugccccuugggccuccccccagccccuccuccccuuccugcacccguacccccguggucuuugaauaaagucugagugggcggc

SEQ ID NO: 156 - RNA, 2090 nt, Artificial Sequence
  Synthetic polynucleotide
gggaaauaagagagaaaagaagaguaagaagaaauauaagaccccggcgccgccaccauggaaacaccagcccagcugcuguuucuccugcuguugugguugccagacacuacaggaaucccccuuggugugauucauaacuccacgcuucaagugucggauguagacaaacuugugugucgggauaagcuuucgucuacaaaccaauuaagaucggugggacugaaccuggaaggaaauggaguggccacugacguccccuccgcgaccaaacgguggggauuucggucaggcgugccccccaaagucgucaauuacgaggccggagagugggcagaaaacuguuauaaccucgaaaucaagaagcccgauggaucggaaugcuugccggcagccccugacgggauccgcggguucccgaggugcagauacgugcacaaagucuccggcaccggaccuugcgccggcgacuucgcguuucacaaagaaggcgcauuuuuucuguacgaucgacuugcaagcacuguuauauauagagggacgacauucgcugaaggcguuguggcauuucugauacugccccaagcuaaaaaggauuuuuuuagcucacauccacuacgggaaccggucaaugcuacugaagauccaucaagcggcuauuauucaaccaccauaagguaucaggcgacagguuuuggcacuaaugaaaccgaguaccucuuugaaguagacaaucucacuuacgugcaacuugagucccgauuuaccccucaguuucugcugcaauuaaacgagacuauuuacacuuccggcaaaaggaguaacacgacaggcaaacugaucuggaaggucaacccugagaucgauaccacgauuggcgagugggcauucugggagacuaaaaaaaaccugaccaggaagauacgguccgaagagcugucuuucacagucguuagcaacggugccaagaacauuuccggccaguccccugcccggaccucgagugaucccggaaccaauacgacaaccgaggaucauaagaucauggccagcgaaaauagcagcgcaaugguacaaguucauucccaagggcgagaagccgcggugucccaccugacuacucuggccacuauuuccacaagcccucagucguuaacaaccaaaccugggccugacaauucaacccauaacacaccuguauauaagcuggauauuucagaggcaacccaaguggaacagcaccauaggagaacggacaaugacucuacagccuccgacacccccucugcaacgaccgcugccggaccacccaaggcugaaaacaccaacacauccaagaguaccgauuuuuuggacccggcgaccacuacgaguccucagaaucacagugaaacggcagggaauaacaacacccaccaucaggauacgggcgaagagucugccaguucuggcaaguuggggcucaucacgaacaccauugccgggguggcuggucuuaucacuggaggucgcaggacgagacgugaggcuauagugaacgcacagccaaaguguaaucccaaccuucauuacuggaccacacaggacgagggagcugcaauuggguuggccuggaucccuuacuuuggacccgcagccgaaggcaucuacaucgaaggccuaaugcacaaucaggacggccuuaucugcggauugcgacagcuugccaaugaaacaacccaggcucuucaacuguuucuaagagccacaacugaguugaggacuuuuagcaucuugaauaggaaagccauagacuucuuguuacagaggugggggggcacaugucacauccucggacccgacuguuguauagagccucaugacuggaccaagaacaucacagauaagauugaccagauuauccaugauuuugucgauaaaacacuucccgaccaaggggauaaugauaacugguggaccggcuggcgccagugauaauaggcuggagccucgguggccaugcuucuugccccuugggccuccccccagccccuccuccccuuccugcacccguacccccguggucuuugaauaaagucugagugggcggc

SEQ ID NO: 157 - RNA, 2447 nt, Artificial Sequence
  Synthetic polynucleotide
gggaaauaagagagaaaagaagaguaagaagaaauauaagaccccggcgccgccaccauggaaacgccagcacaauuacuuuuucugcuuuugcuguggcucccugacacaacuggacaucaccaccaucaucauggcaaaccuauaccuaacccucugcugggucuggacucuaccggugauuggaaaugggauggaggccuggucccucggggcucugaugagauguugcgagagcugcaggagacuaacgcagcacuccaggacguccgcgaacuucuccgacagcagguuagacagaucaccuuccuuagauguuuacuuaugggggggagacugcucugcagauuggaagagcuggagaggcgucuggaagagcuggagcggcgccuugaggaacuggaacgggccauuaauacaguugaugaguuggccgccuugaggagacgucuggaggaacuagcacgcggcucuauaccucuagggguuauccauaauuccacgcuccagguuagugacguugacaagcuggugugccgcgauaaauuaucuuccacgaaccaguugagauccguuggacuaaaucuugagggaaacggcguugccacagacgugccaucugccaccaaaaggugggguuuccgcuccggugugccccccaaaguggugaauuacgaggcaggggaaugggcggaaaacuguuacaaucuggaaauuaagaagccugacggcagugagugucugccggccgcuccugacggaauaagaggguucccaagguguagauacgugcacaaggucucuggaaccggaccuugcgccggggacuucgccuuccacaaagaaggugcauuuuuccuauaugaccgcuuagccucgacagugauuuacaggggcaccacuuucgcagaggggguagucgcuuucuuaauuuugccucaggcgaaaaaggacuuuuuuucuagucacccccucagggagccuguaaacgcaaccgaggacccaaguagcgguuacuacuccacaacgaucagguaccaggccaccggauuuggcacaaacgaaacggaauaccuauuugaagucgacaaccugaccuacguccagcuggagucccgauucacgccccaguuccuacugcagcugaaugagacaauuuacacuucugguaaaagaaguaacaccacuggaaaacucaucuggaaggucaauccagaaauugauacaacaaucggugagugggcuuuuugggagacgaaaaaaaacuugaccagaaaaaucagguccgaggagcugaguuucacgguaguuagcaacggagcgaaaaauaucucaggacagaguccagcccgaaccucuucggauccaggcacuaauacgacaacagaagaccauaagauuauggcuagugagaacucaucugcuaugguccaggugcacucgcaaggacgcgaagcagcugugucacaucugaccacccuugcaacuaucagcacaaguccucagagcuuaaccaccaagccuggucccgacaauucuacacacaauacuccuguuuacaaauuagacaucagugaagccacccagguugaacaacaccaccggcggacggacaaugacucaacggcaucugacaccccauccgccacaacggcugccgggccaccaaaagcugagaauaccaacacaucaaagucaaccgacuucuuagaccccgcuacaaccaccuccccccaaaaucauuccgaaacugccgguaacaacaacacccaccaccaggauaccggggaggaaagcgccagcagcggcaagcuaggccugaucacaaacacaaucgccggggucgcaggccuaaucaccggaggcagacguacacgucgggaggcuauuguuaaugcccagccuaaaugcaauccgaaucuucauuauuggaccacccaggaugaaggagcugccauuggacuggcuuggaucccuuacuuuggccccgccgcugagggaauuuauauagaggggcugaugcacaaccaagauggacuaauuuguggacuccgccagcuggccaaugaaaccacccaagcuuuacaacucuuucugagagcaacaacagaacuucggacauuuucuauauugaauagaaaggcuauugauuuccuucuccagagauggggugguaccugccacauacucgguccagauuguugcauagaaccucaugacuggaccaaaaauauuacugacaaaaucgaucagaucauucacgauuucguggauaagacauuacccgaccaaggcgacaacgacaacugguggacuggauggaggcagugauaauaggcuggagccucgguggccaugcuucuugccccuugggccuccccccagccccuccuccccuuccugcacccguacccccguggucuuugaauaaagucugagugggcggc

SEQ ID NO: 158 - RNA, 2204 nt, Artificial Sequence
  Synthetic polynucleotide
gggaaauaagagagaaaagaagaguaagaagaaauauaagaccccggcgccgccaccaugggagucaccggcauucugcagcuccccagggaucguuucaaaagaacuuccuuuuuucuguggguaaucauccuguuccaaaggacguuuuccaucccccugggaguuauacacaacaguacauugcaggucucugacguagacaaacucgucugccgggacaaacuuucuagcacuaaucagcugcggucgguaggucugaacuuggaagguaauggugucgccacagaugugccauccgccaccaaacgcuggggguuccggucaggcgugcccccaaaagucgucaacuaugaagcaggcgaaugggcggaaaacuguuauaaucucgagaucaaaaaaccugacggguccgaguguuugcccgccgcuccugacggcaucagaggcuucccuaggugcagauauguccacaagguaucagguaccggcccaugugcuggggacuucgcuuuccacaaggaaggagcuuucuuucucuacgacaggcuggccucuaccgucauauauaggggaacuaccuucgccgaaggcguuguugccuuuuugauccugccucaggccaaaaaagacuucuuuucuucccauccccugcgggagccaguuaacgcuaccgaggacccgagcucuggcuauuacaguaccaccauccgguaucaagcuaccggauucggcacgaacgaaaccgaguaccuauucgagguggacaaccugacauauguucaacuggagucccgguucaccccccaguuucugcugcaguugaacgagaccaucuacacaagcgguaaaaggucuaauaccacuggaaaacugaucuggaaaguaaacccggagauagauaccaccauuggagaaugggcauucugggagaccaagaaaaauuugaccaggaaaauacgcucugaagaacuguccuuuacgguggugucuaauggggcgaagaacaucuccggacagagcccugcgcgcacauccucagauccaggcacaaauaccacaacagaggaucacaagauuauggcaucugagaauagcagcgcuauggugcagguucacagccaaggcagagaggccgcgguuucccaucucacaacauuggcuacuaucagcaccucuccucaaagccugacaacaaagccugguccagauaauucuacccauaauacuccaguguauaaacucgacauuucugaggcuacacaaguggagcagcaccauagaagaacagacaacgacucaacugccuccgacaccccuucagcgacaaccgccgccggcccuccuaaggcggaaaacacuaauacuucgaaaucaaccgauuuucuggauccagcgaccaccaccucgccucagaaucauucggaaacggcuggaaauaauaacacccaccaccaggacaccggcgaagaaagugccagcaguggcaagcucgggcugaucaccaauacuaucgcggggguggccgggcuaauuacaggcggcagacggaccaggagagaggccauuguaaacgcccagccuaaaugcaaccccaaccugcauuacuggaccacccaagacgagggcgccgcaauugguuuggcuuggauccccuauuuuggacccgccgccgaagggauuuauaucgaaggacugaugcacaaccaggauggccuuauuugugggcuucggcagcuggccaaugagacgacacaagcgcugcaguuauucuugagagccacuaccgagcuuaggaccuucagcauucugaaucgcaaggccaucgacuuccuguugcagcgauggggggguaccugccauauucugggcccugauugcuguauagaaccccacgacuggacgaagaauauaaccgauaaaauagaucagaucauccacgacuuugucgacaaaacacucccagaucagggcgauaacgauaauugguggaccggcuggaggcaguggaucccagcaggaaucggggugacaggcguuauuaucgcggucauagcacuguuuugcaucugcaaguucgucuuuugauaauaggcuggagccucgguggccaugcuucuugccccuugggccuccccccagccccuccuccccuuccugcacccguacccccguggucuuugaauaaagucugagugggcggc

SEQ ID NO: 159 - RNA, 2246 nt, Artificial Sequence
  Synthetic polynucleotide
gggaaauaagagagaaaagaagaguaagaagaaauauaagaccccggcgccgccaccaugggggugacagggauauugcagcugccucgggaucgcuucaagcgcaccuccuuuuuucugugggucaucauccucuuucagcgcacauuuagcauuccgcucggcguaauucauaauucaacucuacaagucucugacguggacaaauuggucugccgggacaaguugucuucgacaaaccaauugaggucuguagggcugaaccucgagggcaaugguguggcgacggauguacccucggccaccaagcguuggggcuuuaggucuggcguccccccuaaaguggugaacuaugaagcuggggaaugggccgaaaauugcuacaaucuggaaauuaagaaaccugacggaagcgagugucucccagcugccccagacgguauccgcggguuccccagaugcagguacguucauaaagugaguggaaccggcccaugcgccggagauuucgcauuccacaaggaaggugcuuucuuucuuuacgacaggcuagccuccacagugaucuaucgcggcaccaccuucgcagagggcgugguugccuuuuugauccugccucaggccaaaaaagacuucuucaguucucacccucugagggaaccagugaacgccaccgaggacccuuccagcggauacuacagcaccacgauccgcuaucaagcgaccgguuucgggaccaacgagacugaguaccucuuugaaguggauaaccugacauaugugcagcuggaaucucgguuuaccccgcaguuccuucuccagcugaaugaaacuauauacaccucaggcaagagauccaauaccacagguaaauugauuuggaaaguuaaucccgaaaucgacacaacgauuggggagugggccuuuugggagaccaagaaaaaucugacacgcaagaucagaagugaggaguugaguuucaccguggucagcaauggcgcgaaaaauauuuccggucaaucuccagccaggacuagcucugacccuggaacgaacacuaccacagaagaccauaagaucauggcaagugagaauucuuccgcuaugguucaggugcacucccagggccgggaagccgccgucucacaccugacaacccucgccacaaucuccacuuccccacagucccugacaaccaaacccgggccugacaacucaacacauaauacgccaguuuacaagcucgauaucucugaggcuacccagguggagcaacaccacaggcggacugacaacgacagcaccgcuagugauacccccucagccaccacugccgcagguccccccaaggccgaaaauacaaauaccaguaaaaguacggacuuccuggaccccgcaacuacaaccuccccccaaaaccacagcgaaacggcagggaauaauaauacacaccaucaggauaccggagaggaguccgcuucuuccggcaagcugggacugauaaccaacacaauugccggaguggcaggucugauuacgggagggcgcaggacuagacgggaagcaaucgugaacgcacagccaaagugcaauccuaaccugcacuacuggacuacccaagaugaaggggcagccauugggcuugcauggauccccuacuuugggccugcagcggaggggauuuauaucgaaggccugaugcauaaucaggauggauugauuugcgggcucaggcaguuggcgaaugaaacaacacaagcccuacaauuauuucugagggccacuacugaguugcgaacauuuaguauccucaauagaaaggccauagacuuccugcuccagcgcuggggcgggacuugccacauucuaggcccggacuguuguaucgaaccccaugacuggaccaagaacauaacugauaagauagaccagaucauccaugauuucguugauaaaacacugcccgaucagggugacaacgacaauugguggacuggcuggaggcaguggaucccagcuggcauugggguuacagguguuauaauugccgugauugcucucuucugcaucugcaaauuugucuucgguaaaccaauacccaauccacugcugggccuggauagcacgugauaauaggcuggagccucgguggccaugcuucuugccccuugggccuccccccagccccuccuccccuuccugcacccguacccccguggucuuugaauaaagucugagugggcggc

SEQ ID NO: 160 - RNA, 2126 nt, Artificial Sequence
  Synthetic polynucleotide
gggaaauaagagagaaaagaagaguaagaagaaauauaagaccccggcgccgccaccaugggagugacuggcauucuucagcuuccucgcgacagguuuaagagaaccucguucuuccugugggucauuauacuuuuccagcgcacauucagcaucccacuuggagugauucauaauucuacacuucagguuagcgacguggacaagcuggucugccgggacaaacugucgucaacaaaucagcuuagguccguaggccugaaccuugaagguaacggcguugcaacagaugugccuagcgcaacgaagcgguggggauuuaggucugguguuccaccaaaaguggucaauuacgaggccggagagugggcagagaacugcuauaaccuggaaauaaaaaagccugacgguagcgaaugccugccagccgcgccagauggcauucggggguuuccccgcugucgcuacguccacaaaguaagugguacugggccuugugccggugacuucgccuuucacaaagagggcgcguucuuuuuguaugaccgucucgccuccacaguaauuuaccgaggcacuacauuugcagaaggggugguggcauuccuuauauuaccccaggcuaaaaaggacuucuucucuagccacccacuccgggaaccagugaaugcaaccgaggauccaagcucgggguacuauucuaccacuaucagguaucaggcaacaggguuugguacaaaugagacugaauaucucuucgagguugacaaccugaccuacgugcagcuggaaagucguuucacuccgcaguuccucuugcagcucaaugagaccauauauaccagugggaaacggucuaacacaaccggaaaacugauuuggaaaguuaacccagaaauugauacuacgauuggugagugggcguuuugggagacaaagaagaauuuaacuaggaagaucagguccgaagaacugucauucacuguggugucuaacggcgcgaaaaauaucucugggcagucuccagcccgcacauccuccgauccuggaacgaauacaaccaccgaagaucauaagaucauggccagcgaaaacuccuccgccaugguccaaguccauucccaagggagggaagcugcagucucccaccucacuacuuuggcaaccauuagcacuucgccacaaagccugaccaccaagcccggcccggauaauucaacccacaacaccccaguuuauaaacuggauaucagugaggcgacucagguggagcagcaucaccgaagaacugauaaugauucuacugccagcgacaccccaagcgcgaccaccgcugccggaccucccaaggccgagaauacuaacacuucgaaaucaacagacuuucuggaucccgccacaaccacguccccacagaaucacucugaaaccgccgguaacaauaauacacaucaccaggauaccggggaggaauccgcuucuagcgggaagcugggccuuauaacaaauacgauagcagggguggccggacucaucacagggggucggaggacacggcgggaggcuauagucaaugcucagccuaaaugcaacccgaaucugcacuauuggaccacacaggacgagggagccgccaucgggcuggcauggauuccauauuucggcccagccgcugagggcaucuacaucgagggucuuaugcacaaccaggacgggcuaaucugcggacuuaggcagcuggccaacgagacaacacaggcacuccagcucuuccuucgcgcuacaacagagcuacggaccuuuuccauucucaacaggaaggccauagacuuccucuugcagcgguggggaggcaccugucauauucucgggcccgauuguuguaucgaaccucaugauuggaccaaaaauauuacagauaagauugaucaaaucauccacgauuucguagauaagacacuccccgaccagggagacaaugacaacugguggacgggguggcgacagugauaauaggcuggagccucgguggccaugcuucuugccccuugggccuccccccagccccuccuccccuuccugcacccguacccccguggucuuugaauaaagucugagugggcggc

SEQ ID NO: 161 - RNA, 2168 nt, Artificial Sequence
  Synthetic polynucleotide
gggaaauaagagagaaaagaagaguaagaagaaauauaagaccccggcgccgccaccaugggcgugacugggauccuccaacugccucgcgauagauucaagcgaacuaguuucuuucuaugggucaucauacucuuccagcgaaccuucucaauuccacugggagucauucacaacuccaccuugcaagugucagauguggacaaguugguaugccgagacaaacucucuucuacuaaucagcucaggucuguggggcugaaccuugaagguaacggcguggccacagaugugccuucggcuacuaagcgaugggguuuccgguccggugugcccccgaaggugguaaauuaugaggcuggcgagugggccgaaaacugcuauaacuuggagauuaaaaagccugacgguagcgaauguuuaccagccgcucccgauggaauuaggggcuuucccagaugucgguauguccacaaagugucuggaacugggccuugugcuggggauuuugccuuccauaaagaaggggccuucuuucuauacgaucggcuggccaguaccgucauuuaucgaggcacuacuuucgccgaaggcguuguggcguuuuugauucucccacaggccaagaaagacuucuuuuccucacauccucuacgggagccaguaaaugcaaccgaagauccuucuaguggcuacuacuccaccacuauucgguaccaggcuaccggauucggcaccaaugagacagaauauuuauuugagguggacaaccuuacuuaugugcaguuggaaagcagguucaccccccaguuccuccugcaguugaacgagacaauuuauacaucagguaagcggucuaacacuaccgguaaguuaaucuggaaagugaaccccgagaucgacacgaccaucggggaaugggcuuuuugggagaccaagaaaaaccugacgcgcaagauuagauccgaggagcucaguuucacuguggugaguaauggcgcuaaaaauaucagugggcagagccccgcccggacaagcagcgacccugggacaaacacuacaaccgaagaccacaaaauaauggccucagaaaacaguagcgcgauggugcaagugcauagccaaggacgcgaagccgcuguaucccaucuuaccacccuggcuacgauuagcaccucgccccagucucugacuacgaagccagggccugacaauucuacacacaacacacccguguacaaacuugacaucucagaagcaacgcagguggaacagcaucaccgccggacggauaacgacagcaccgcaagcgauacccccagugcuacuacugcagccggucccccaaaagcagaaaauacgaauaccagcaagaguacagacuucuuggacccggccaccacaacaagcccacaaaaucacagcgagacugcaggcaacaauaacacacaucaccaggauacgggggaggaaucugcuucguccggcaaacucggacugaucacaaauacgaucgccgggguggccggcuugaucaccggcggcaggcggacucggagagaagccauagugaacgcucagccuaagugcaauccgaaucuacacuauuggacuacucaggacgaaggcgcagcuauuggcuuggcuuggauuccauacuuugggccagcagcagagggaauauacaucgagggacugaugcauaaccaggauggccugaucuguggccuccgacaguuggcuaaugaaacuacccaggcccuccaauuguuccugcgcgcuacaacugaacuucggaccuuuucuauuuugaacaggaaggccauagauuuccugcuucagcguuggggcggaacaugccauauccugggccccgacuguuguaucgagccucaugauuggacgaagaauauaacugauaaaauagaucaaauaauccacgacuucgucgacaagacccugccugaccagggggacaaugauaacugguggacuggauggcgacaggguaagccaaucccgaacccucuucucggucuggauagcacgugauaauaggcuggagccucgguggccaugcuucuugccccuugggccuccccccagccccuccuccccuuccugcacccguacccccguggucuuugaauaaagucugagugggcggc

SEQ ID NO: 162 - RNA, 2393 nt, Artificial Sequence
  Synthetic polynucleotide
gggaaauaagagagaaaagaagaguaagaagaaauauaagaccccggcgccgccaccauggacaguaggccccagaagaucuggauggcaccaucucucacugagagugauauggacuaucauaagauccugacggcagggcugagcgugcagcaaggcaucgucaggcagcgggugaucccaguauaucaggucaacaaccuugaggagauuugucaacugauaauucaggccuuugaagccggcgucgacuuucaagaaagugcagauagcuuucuccugaugcuguguuugcaccaugcguaccagggcgacuauaagcuguuccuggagucuggggcuguuaaguaccuggaggggcacgguuucagguuugaggugaagaagcgggacggcgucaagagguuagaggaacugcugccagcagugagcucugguaagaauauuaaaaggacccucgcugcaaugccggaggaggaaaccacagaggcaaacgcuggccaguuccugagcuucgcaucucuuuuucuaccgaagcuagugguaggagaaaaagcuugccucgaaaagguacagagacagauccagguucacgcugaacaggggcuuauccaguacccaaccgcuuggcagucggugggucacaugauggugauuuucagacugaugcggacaaauuuucugauuaaguuccugcuuauucaccaggggaugcauaugguggcaggccacgaugcaaaugacgccguaaucucuaauagcguugcucaagcgcgcuucucugggcugcugaucgugaaaacagugcuggaucauaucuuacaaaagacugagaggggugugaggcugcacccccuggcuagaaccgcaaaggucaagaaugaagugaauucguuuaaggcugcccucucuucacucgccaaacacggggaguacgcgccuuucgcaagacugcugaaccuuucaggggugaacaaucuugagcauggauuguuuccacaguuguccgccauugcacugggcguggcaacagcacacggguccacucuggccggugugaacguuggggagcaguaucaacagcucagggaagcugccacugaggccgagaaacagcuccagcaguacgccgagucccgcgaauuggaucaccucggccucgacgaccaggaaaagaagauucugaugaauuuucaucaaaaaaaaaacgagauuucauuucaacagaccaacgcaauggugacucuuagaaaagagcgccuagccaaauuaacggaggccauaaccgcagccagccuaccaaagacaucugggcacuacgacgacgacgacgacaucccguuucccgguccaauuaaugacgacgacaaucccggccaccaagacgacgacccaacugacucgcaggacaccacgauucccgaugucgugguggaccccgaugacgggagcuacggagaauaucaaagcuacucugagaacggcaugaaugcacccgacgaucuggugcuguuugacuuggacgaggacgaugaagauacuaagcccgugcccaauaggucaacuaaaggcggccagcagaaaaauucccaaaaggggcagcacaucgagggcagacaaacacaauccagaccuauacagaaugugccuggaccccaccgcacuauucaccacgcaagugcuccucugaccgacaaugaucgcaggaaugagccaucugguuccacaucuccgagaaugcuuacaccuaucaacgaagaggccgacccgcucgacgaugcggacgacgagaccucuaguuugccuccucuugagucagaugacgaagaacaggaccgggauggaacaucgaauagaacuccuacaguggcuccgcccgcuccaguauaccgcgaucacagugagaagaaggagcugccacaggaugaacaacaggaccaggaucacacccaagaagcacguaaccaggacucggauaacacucagucagaacacucuuuugaggagauguaucggcacauucuucgaucgcaagguccauuugacgcaguccucuacuaccacaugaugaaggaugaacccgucguuuuuuccacaagcgaugggaaagaguauacauacccggauuccuuggaggaggaguacccgcccuggcugacagagaaagaggcgaugaacgaggagaaccgcuuuguaacucuggacggucagcaauuuuauuggcccguuaugaaucacaagaacaaguucauggcuaucuugcaacaucaccagugauaauaggcuggagccucgguggccaugcuucuugccccuugggccuccccccagccccuccuccccuuccugcacccguacccccguggucuuugaauaaagucugagugggcggc

SEQ ID NO: 163 - RNA, 92 nt, Artificial Sequence
  Synthetic polynucleotide
ucaagcuuuuggacccucguacagaagcuaauacgacucacuauagggaaauaagagagaaaagaagaguaagaagaaauauaagagccacc

SEQ ID NO: 164 - RNA, 119 nt, Artificial Sequence
  Synthetic polynucleotide
ugauaauaggcuggagccucgguggccaugcuucuugccccuugggccuccccccagccccuccuccccuuccugcacccguacccccguggucuuugaauaaagucugagugggcggc

SEQ ID NO: 165 - RNA, 57 nt, Artificial Sequence
  Synthetic polynucleotide
gggaaauaagagagaaaagaagaguaagaagaaauauaagaccccggcgccgccacc

SEQ ID NO: 166 - DNA, 2260 bp, Artificial Sequence
  Synthetic polynucleotide
tcaagcttttggaccctcgtacagaagctaatacgactcactatagggaaataagagagaaaagaagagtaagaagaaatataagagccaccatggaaacccctgcccagctgctattcctgctgctcctctggctgcctgacaccaccggcctgcccatcctggaaatcgccagcaacaatcagccacagaacgtggacagcgtgtgcagcggcaccctgcagaaaaccgaagacgtgcacctgatgggcttcaccctgagcggacaaaaggtagccgacagccctttagaggccagcaagagatgggccttcagaaccggcgtgccccccaagaatgtggagtacacggagggcgaggaagccaagacctgttacaacatcagcgtgaccgatccaagcggcaagtctctgctgttggacccccctaccaacatccgggactaccccaagtgcaagaccatccatcacatccagggccagaaccctcacgcccagggaattgccctgcacctgtggggcgcctttttcctgtacgaccggatcgcctccaccaccatgtaccggggcaaggtgttcacagagggtaatatcgccgccatgatcgtgaacaaaaccgtgcacaaaatgatcttcagccgtcaaggccaaggctaccggcacatgaacctgaccagcaccaacaagtactggaccagcagcaacggcacccagaccaacgacaccggctgttttggagccctgcaggagtacaacagcacgaagaaccagacctgcgcccccagcaaaatccccccaccgctgcctacagccagacccgagatcaagctgacctccacccctaccgacgccaccaagctgaacaccacggaccctagcagcgacgacgaggatctggccacatcgggctctggcagcggcgagagagagccacataccacctctgacgccgtaaccaagcagggcctgagctccacaatgcctccgaccccatctcctcaacctagcacacctcagcaaggcggcaacaacaccaatcacagccaggatgctgtgaccgaactggacaagaacaataccaccgcccagccctccatgccccctcataacaccacaaccatctccacaaacaacacttccaagcacaacttcagcacactgtccgcccctctgcagaataccactaacgataacacccagagcaccatcaccgagaacgagcagacaagcgcccctagcatcaccaccctgcctcccaccggaaatccaacaaccgccaagagcacgagctccaagaagggccctgccaccacagcccccaacacgaccaatgagcactttaccagccccccgcccaccccctcctctacagcccagcacctggtgtacttccggcggaagagatccatcctgtggcgcgagggcgatatgttccccttcctggacggcctcatcaacgcccccatcgacttcgaccccgtgcccaacacaaagacgatcttcgacgaaagcagctcctccggcgccagcgccgaagaggatcagcatgccagcccaaacatctccctgaccctcagctacttccccaatatcaacgagaacaccgcctattccggcgagaatgagaacgactgcgacgccgagctgcggatttggagcgttcaggaagatgacctggccgctgggctgtcctggatcccttttttcggccctggaatcgagggcctgtacaccgccgtgctgattaagaatcagaacaacctcgtgtgccggctgcggcggctggccaatcagacagccaaaagcctggaactgctgctgagagtgaccaccgaggaacggaccttcagcctgatcaatcggcacgccatcgattttctgctgaccagatggggcggcacttgtaaggtgctgggccccgactgttgcatcggcatcgaggacctgagcaagaatatctccgagcaaatcgaccagatcaagaaggatgagcagaaagagggaaccgggtggggactgggcggaaagtggtggacatctgactggggcgtgctgactaacctgggaatacttctgctcctgtctatcgcagtgctgatcgccctgagctgcatctgccggatcttcaccaagtacatcggctgataataggctggagcctcggtggccatgcttcttgccccttgggcctccccccagcccctcctccccttcctgcacccgtacccccgtggtctttgaataaagtctgagtgggcggc

SEQ ID NO: 167 - DNA, 2225 bp, Artificial Sequence
  Synthetic polynucleotide
gggaaataagagagaaaagaagagtaagaagaaatataagaccccggcgccgccaccatggaaacccctgcccagctgctattcctgctgctcctctggctgcctgacaccaccggcctgcccatcctggaaatcgccagcaacaatcagccacagaacgtggacagcgtgtgcagcggcaccctgcagaaaaccgaagacgtgcacctgatgggcttcaccctgagcggacaaaaggtagccgacagccctttagaggccagcaagagatgggccttcagaaccggcgtgccccccaagaatgtggagtacacggagggcgaggaagccaagacctgttacaacatcagcgtgaccgatccaagcggcaagtctctgctgttggacccccctaccaacatccgggactaccccaagtgcaagaccatccatcacatccagggccagaaccctcacgcccagggaattgccctgcacctgtggggcgcctttttcctgtacgaccggatcgcctccaccaccatgtaccggggcaaggtgttcacagagggtaatatcgccgccatgatcgtgaacaaaaccgtgcacaaaatgatcttcagccgtcaaggccaaggctaccggcacatgaacctgaccagcaccaacaagtactggaccagcagcaacggcacccagaccaacgacaccggctgttttggagccctgcaggagtacaacagcacgaagaaccagacctgcgcccccagcaaaatccccccaccgctgcctacagccagacccgagatcaagctgacctccacccctaccgacgccaccaagctgaacaccacggaccctagcagcgacgacgaggatctggccacatcgggctctggcagcggcgagagagagccacataccacctctgacgccgtaaccaagcagggcctgagctccacaatgcctccgaccccatctcctcaacctagcacacctcagcaaggcggcaacaacaccaatcacagccaggatgctgtgaccgaactggacaagaacaataccaccgcccagccctccatgccccctcataacaccacaaccatctccacaaacaacacttccaagcacaacttcagcacactgtccgcccctctgcagaataccactaacgataacacccagagcaccatcaccgagaacgagcagacaagcgcccctagcatcaccaccctgcctcccaccggaaatccaacaaccgccaagagcacgagctccaagaagggccctgccaccacagcccccaacacgaccaatgagcactttaccagccccccgcccaccccctcctctacagcccagcacctggtgtacttccggcggaagagatccatcctgtggcgcgagggcgatatgttccccttcctggacggcctcatcaacgcccccatcgacttcgaccccgtgcccaacacaaagacgatcttcgacgaaagcagctcctccggcgccagcgccgaagaggatcagcatgccagcccaaacatctccctgaccctcagctacttccccaatatcaacgagaacaccgcctattccggcgagaatgagaacgactgcgacgccgagctgcggatttggagcgttcaggaagatgacctggccgctgggctgtcctggatcccttttttcggccctggaatcgagggcctgtacaccgccgtgctgattaagaatcagaacaacctcgtgtgccggctgcggcggctggccaatcagacagccaaaagcctggaactgctgctgagagtgaccaccgaggaacggaccttcagcctgatcaatcggcacgccatcgattttctgctgaccagatggggcggcacttgtaaggtgctgggccccgactgttgcatcggcatcgaggacctgagcaagaatatctccgagcaaatcgaccagatcaagaaggatgagcagaaagagggaaccgggtggggactgggcggaaagtggtggacatctgactggggcgtgctgactaacctgggaatacttctgctcctgtctatcgcagtgctgatcgccctgagctgcatctgccggatcttcaccaagtacatcggctgataataggctggagcctcggtggccatgcttcttgccccttgggcctccccccagcccctcctccccttcctgcacccgtacccccgtggtctttgaataaagtctgagtgggcggc

SEQ ID NO: 168 - DNA, 2260 bp, Artificial Sequence
  Synthetic polynucleotide
tcaagcttttggaccctcgtacagaagctaatacgactcactatagggaaataagagagaaaagaagagtaagaagaaatataagagccaccatggaaacccctgcccagctgctgttcctgcttctgctgtggctgcccgataccaccggactccccgtgctggaaatcgccagcaacagccagccccaggacgtggactctgtatgtagcggcaccctgcagaaaaccgaagacgtgcacctgatgggcttcaccctgagcgggcagaaagtggccgacagccctctggaagccagcaagagatgggccttcagaaccggcgtgccccccaaaaacgtggagtacacggagggcgaggaagccaagacctgctacaatatcagcgtgaccgaccccagcggcaagtctctcctgctggatcccccttctaacatccgggactatcccaagtgcaagaccgtgcaccacatccagggccagaatcctcacgcccagggaattgccctgcacttatggggcgcctttttcctgtatgaccgggtggccagcaccaccatgtaccggggcaaggtgttcaccgagggcaatatcgccgccatgatcgtgaacaagacagtgcacagaatgatcttcagcagacagggacagggctaccggcacatgaacctgacctccaccaacaagtactggaccagcagcaacgagacacagcggaacgacaccggctgcttcggcattctgcaagaatacaactcaaccaataaccagacctgcccccctagcctgaagcctccgtcgctgcctaccgtgacgcccagcatccacagcacaaatacccagatcaacaccgccaagtccggcaccatgaatcccagcagcgacgacgaggacctgatgatcagcggctctggcagcggcgagcagggccctcacacaacactgaacgttgtgaccgagcagaagcagagcagcactatcctgagcacccccagcctgcaccctagcacatctcaacacgagcaaaatagcaccaacccctcccgccacgccgtgacagagcacaacggcaccgacccgacaacccagcccgccaccttactgaacaacaccaacaccacccccacctataacaccttaaagtacaacctgtccaccccctccccccccacccggaacatcacaaacaacgacacgcagagagagctggccgaaagcgagcagacaaatgctcagctgaataccaccctggaccccaccgagaaccccacaaccggccaggacaccaattccacaaccaacatcataatgaccaccagcgacatcaccagcaagcacccgaccaacagctcccctgatagtagccccaccaccagaccacccatatacttcagaaagaagcggagcatcttctggaaagaaggcgatatctttcccttcctggacggcctgatcaatacggagatcgacttcgaccccatccccaacaccgagacgatcttcgacgagagccccagcttcaacacctccacaaatgaagaacagcacaccccgcccaacatttctctgaccttcagctacttccccgacaagaacggcgacaccgcctactccggcgagaacgagaatgactgcgatgccgaactgcggatttggagcgtacaggaagatgacctggccgctggcctgagctggataccttttttcggccctggcatcgagggcctgtacaccgccgggctgatcaagaatcagaacaacctcgtgtgccggctgcggagactggccaatcagacagccaaaagcctggaactgctgctaagagtgaccaccgaggaaagaaccttctccctcatcaaccggcatgccatcgactttctgctgaccagatggggaggcacatgcaaggtactgggccccgattgctgcatcggaatcgaggatctgagcaagaacatctccgaacagatcgacaagatccggaaggatgagcagaaagaggaaaccggctggggcctgggcgggaagtggtggacttctgattggggcgtgctcaccaacctgggaatcctgctgctcctctctatcgccgtgctgatcgcccttagctgcatctgccggattttcaccaagtacatcggctgataataggctggagcctcggtggccatgcttcttgccccttgggcctccccccagcccctcctccccttcctgcacccgtacccccgtggtctttgaataaagtctgagtgggcggc

SEQ ID NO: 169 - DNA, 2225 bp, Artificial Sequence
  Synthetic polynucleotide
gggaaataagagagaaaagaagagtaagaagaaatataagaccccggcgccgccaccatggaaacccctgcccagctgctgttcctgcttctgctgtggctgcccgataccaccggactccccgtgctggaaatcgccagcaacagccagccccaggacgtggactctgtatgtagcggcaccctgcagaaaaccgaagacgtgcacctgatgggcttcaccctgagcgggcagaaagtggccgacagccctctggaagccagcaagagatgggccttcagaaccggcgtgccccccaaaaacgtggagtacacggagggcgaggaagccaagacctgctacaatatcagcgtgaccgaccccagcggcaagtctctcctgctggatcccccttctaacatccgggactatcccaagtgcaagaccgtgcaccacatccagggccagaatcctcacgcccagggaattgccctgcacttatggggcgcctttttcctgtatgaccgggtggccagcaccaccatgtaccggggcaaggtgttcaccgagggcaatatcgccgccatgatcgtgaacaagacagtgcacagaatgatcttcagcagacagggacagggctaccggcacatgaacctgacctccaccaacaagtactggaccagcagcaacgagacacagcggaacgacaccggctgcttcggcattctgcaagaatacaactcaaccaataaccagacctgcccccctagcctgaagcctccgtcgctgcctaccgtgacgcccagcatccacagcacaaatacccagatcaacaccgccaagtccggcaccatgaatcccagcagcgacgacgaggacctgatgatcagcggctctggcagcggcgagcagggccctcacacaacactgaacgttgtgaccgagcagaagcagagcagcactatcctgagcacccccagcctgcaccctagcacatctcaacacgagcaaaatagcaccaacccctcccgccacgccgtgacagagcacaacggcaccgacccgacaacccagcccgccaccttactgaacaacaccaacaccacccccacctataacaccttaaagtacaacctgtccaccccctccccccccacccggaacatcacaaacaacgacacgcagagagagctggccgaaagcgagcagacaaatgctcagctgaataccaccctggaccccaccgagaaccccacaaccggccaggacaccaattccacaaccaacatcataatgaccaccagcgacatcaccagcaagcacccgaccaacagctcccctgatagtagccccaccaccagaccacccatatacttcagaaagaagcggagcatcttctggaaagaaggcgatatctttcccttcctggacggcctgatcaatacggagatcgacttcgaccccatccccaacaccgagacgatcttcgacgagagccccagcttcaacacctccacaaatgaagaacagcacaccccgcccaacatttctctgaccttcagctacttccccgacaagaacggcgacaccgcctactccggcgagaacgagaatgactgcgatgccgaactgcggatttggagcgtacaggaagatgacctggccgctggcctgagctggataccttttttcggccctggcatcgagggcctgtacaccgccgggctgatcaagaatcagaacaacctcgtgtgccggctgcggagactggccaatcagacagccaaaagcctggaactgctgctaagagtgaccaccgaggaaagaaccttctccctcatcaaccggcatgccatcgactttctgctgaccagatggggaggcacatgcaaggtactgggccccgattgctgcatcggaatcgaggatctgagcaagaacatctccgaacagatcgacaagatccggaaggatgagcagaaagaggaaaccggctggggcctgggcgggaagtggtggacttctgattggggcgtgctcaccaacctgggaatcctgctgctcctctctatcgccgtgctgatcgcccttagctgcatctgccggattttcaccaagtacatcggctgataataggctggagcctcggtggccatgcttcttgccccttgggcctccccccagcccctcctccccttcctgcacccgtacccccgtggtctttgaataaagtctgagtgggcggc

SEQ ID NO: 170 - DNA, 2260 bp, Artificial Sequence
  Synthetic polynucleotide
tcaagcttttggaccctcgtacagaagctaatacgactcactatagggaaataagagagaaaagaagagtaagaagaaatataagagccaccatggaaacccctgcccagctgctgttcctgctgctattgtggctgcctgacaccacaggcctgcccatcctggaaatcgccagcaatgaccagccgcagaatgttgacagcgtgtgcagcggcactctgcagaaaaccgaggacgtgcacctgatgggcttcaccctgagcggacagaaggtggctgacagccctctggaagccagcaagagatgggccttcagaaccggagtgccccctaagaatgtggagtacaccgagggcgaggaagccaagacctgttacaacatcagcgtgaccgaccccagcggcaagtctctgttgttagaccctcctaccaatgtgcgggactaccccaagtgcaagaccattcatcacatccagggccagaacccccacgcccaaggaattgctctgcacctgtggggagcctttttcctgtatgaccggatcgcctccaccaccatgtaccggggcaaggtgttcacagagggcaatatcgccgccatgatcgtgaacaagaccgtgcacaagatgatcttcagcagacaaggccagggctaccgacacatgaacctgaccagcaccaacaagtactggaccagcagcaacggcacccagacgaacgacaccggctgcttcggaaccctgcaggagtacaactccaccaagaaccagacctgcaccccctccaagaccccgcctagtcctcctacagcgcaccccgagatcaagcccacctcaacccctaccgatgccacaagactgaacacgaccaaccccaacagcgacgacgaggacctcaccacaagcggctctggatccggagagcaggaacccgatacaacctctgacgccgtgaccaagcagggccttagcagcactatgcccccaaccccttcccctcagcctggcacacctcagcagggcggcaacaacacaaaccactctcaagatgccgccaccgagctggacaactcaaataccacagcccagccccccaccccatcacacaatacgaccacaatctccacaaacaataccagcaagcataacctgtctaccctgtccgagctgcctcagaacaccacaaatcctaacacgcagagcatggccacagagaacgagaagaccagcgcgagccccaaaaccacgctccctccaacagagagccccaccaccgaaaagagcacaaataataccaagtccccaacgaccatggaacccaacaccactaacggccactttaccagccctagctcgacgcccaatagcaccacccagcacttaatatactttcggcggaagcggagcatcctgtggcgggagggcgacatgttccccttcctggacggcctgataaacgcccccatcgacttcgaccccgtgcccaacactaagaccatcttcgacgaaagcagcagctccggcgccagcgccgaagaagatcagcacgccagctccaacatctccctgaccctgtcttacctgccccacaccagcgaaaacacagcctactccggcgagaatgagaacgactgcgacgccgaactgcggatttggagcgttcaagaagatgacctggccgctggcctgagctggataccttttttcggccctggcatcgagggactgtacaccgccggactgatcaagaatcagaacaacctcgtctgccggctgcggcggctggccaatcagacagccaaaagcctggaactgctgctgagagtgaccaccgaggaacggaccttctcccttatcaatcggcacgccatcgattttctgctgaccagatggggcggcacatgcaaagtgctgggccccgattgctgcatcggcattgaggacctgtcccggaacatttccgaacagatcgatcagatcaaaaaggacgagcagaaagagggcacgggctggggactgggcggaaagtggtggacatctgactggggagtcctgaccaatctgggaatacttctgctgctctctatcgccgtgctgattgccctcagctgcatctgtagaatcttcaccaagtacatcggctgataataggctggagcctcggtggccatgcttcttgccccttgggcctccccccagcccctcctccccttcctgcacccgtacccccgtggtctttgaataaagtctgagtgggcggc

SEQ ID NO: 171 - DNA, 2225 bp, Artificial Sequence
  Synthetic polynucleotide
gggaaataagagagaaaagaagagtaagaagaaatataagaccccggcgccgccaccatggaaacccctgcccagctgctgttcctgctgctattgtggctgcctgacaccacaggcctgcccatcctggaaatcgccagcaatgaccagccgcagaatgttgacagcgtgtgcagcggcactctgcagaaaaccgaggacgtgcacctgatgggcttcaccctgagcggacagaaggtggctgacagccctctggaagccagcaagagatgggccttcagaaccggagtgccccctaagaatgtggagtacaccgagggcgaggaagccaagacctgttacaacatcagcgtgaccgaccccagcggcaagtctctgttgttagaccctcctaccaatgtgcgggactaccccaagtgcaagaccattcatcacatccagggccagaacccccacgcccaaggaattgctctgcacctgtggggagcctttttcctgtatgaccggatcgcctccaccaccatgtaccggggcaaggtgttcacagagggcaatatcgccgccatgatcgtgaacaagaccgtgcacaagatgatcttcagcagacaaggccagggctaccgacacatgaacctgaccagcaccaacaagtactggaccagcagcaacggcacccagacgaacgacaccggctgcttcggaaccctgcaggagtacaactccaccaagaaccagacctgcaccccctccaagaccccgcctagtcctcctacagcgcaccccgagatcaagcccacctcaacccctaccgatgccacaagactgaacacgaccaaccccaacagcgacgacgaggacctcaccacaagcggctctggatccggagagcaggaacccgatacaacctctgacgccgtgaccaagcagggccttagcagcactatgcccccaaccccttcccctcagcctggcacacctcagcagggcggcaacaacacaaaccactctcaagatgccgccaccgagctggacaactcaaataccacagcccagccccccaccccatcacacaatacgaccacaatctccacaaacaataccagcaagcataacctgtctaccctgtccgagctgcctcagaacaccacaaatcctaacacgcagagcatggccacagagaacgagaagaccagcgcgagccccaaaaccacgctccctccaacagagagccccaccaccgaaaagagcacaaataataccaagtccccaacgaccatggaacccaacaccactaacggccactttaccagccctagctcgacgcccaatagcaccacccagcacttaatatactttcggcggaagcggagcatcctgtggcgggagggcgacatgttccccttcctggacggcctgataaacgcccccatcgacttcgaccccgtgcccaacactaagaccatcttcgacgaaagcagcagctccggcgccagcgccgaagaagatcagcacgccagctccaacatctccctgaccctgtcttacctgccccacaccagcgaaaacacagcctactccggcgagaatgagaacgactgcgacgccgaactgcggatttggagcgttcaagaagatgacctggccgctggcctgagctggataccttttttcggccctggcatcgagggactgtacaccgccggactgatcaagaatcagaacaacctcgtctgccggctgcggcggctggccaatcagacagccaaaagcctggaactgctgctgagagtgaccaccgaggaacggaccttctcccttatcaatcggcacgccatcgattttctgctgaccagatggggcggcacatgcaaagtgctgggccccgattgctgcatcggcattgaggacctgtcccggaacatttccgaacagatcgatcagatcaaaaaggacgagcagaaagagggcacgggctggggactgggcggaaagtggtggacatctgactggggagtcctgaccaatctgggaatacttctgctgctctctatcgccgtgctgattgccctcagctgcatctgtagaatcttcaccaagtacatcggctgataataggctggagcctcggtggccatgcttcttgccccttgggcctccccccagcccctcctccccttcctgcacccgtacccccgtggtctttgaataaagtctgagtgggcggc

SEQ ID NO: 172 - RNA, 2260 nt, Artificial Sequence
  Synthetic polynucleotide
ucaagcuuuuggacccucguacagaagcuaauacgacucacuauagggaaauaagagagaaaagaagaguaagaagaaauauaagagccaccauggaaaccccugcccagcugcuauuccugcugcuccucuggcugccugacaccaccggccugcccauccuggaaaucgccagcaacaaucagccacagaacguggacagcgugugcagcggcacccugcagaaaaccgaagacgugcaccugaugggcuucacccugagcggacaaaagguagccgacagcccuuuagaggccagcaagagaugggccuucagaaccggcgugccccccaagaauguggaguacacggagggcgaggaagccaagaccuguuacaacaucagcgugaccgauccaagcggcaagucucugcuguuggaccccccuaccaacauccgggacuaccccaagugcaagaccauccaucacauccagggccagaacccucacgcccagggaauugcccugcaccuguggggcgccuuuuuccuguacgaccggaucgccuccaccaccauguaccggggcaagguguucacagaggguaauaucgccgccaugaucgugaacaaaaccgugcacaaaaugaucuucagccgucaaggccaaggcuaccggcacaugaaccugaccagcaccaacaaguacuggaccagcagcaacggcacccagaccaacgacaccggcuguuuuggagcccugcaggaguacaacagcacgaagaaccagaccugcgcccccagcaaaauccccccaccgcugccuacagccagacccgagaucaagcugaccuccaccccuaccgacgccaccaagcugaacaccacggacccuagcagcgacgacgaggaucuggccacaucgggcucuggcagcggcgagagagagccacauaccaccucugacgccguaaccaagcagggccugagcuccacaaugccuccgaccccaucuccucaaccuagcacaccucagcaaggcggcaacaacaccaaucacagccaggaugcugugaccgaacuggacaagaacaauaccaccgcccagcccuccaugcccccucauaacaccacaaccaucuccacaaacaacacuuccaagcacaacuucagcacacuguccgccccucugcagaauaccacuaacgauaacacccagagcaccaucaccgagaacgagcagacaagcgccccuagcaucaccacccugccucccaccggaaauccaacaaccgccaagagcacgagcuccaagaagggcccugccaccacagcccccaacacgaccaaugagcacuuuaccagccccccgcccacccccuccucuacagcccagcaccugguguacuuccggcggaagagauccauccuguggcgcgagggcgauauguuccccuuccuggacggccucaucaacgcccccaucgacuucgaccccgugcccaacacaaagacgaucuucgacgaaagcagcuccuccggcgccagcgccgaagaggaucagcaugccagcccaaacaucucccugacccucagcuacuuccccaauaucaacgagaacaccgccuauuccggcgagaaugagaacgacugcgacgccgagcugcggauuuggagcguucaggaagaugaccuggccgcugggcuguccuggaucccuuuuuucggcccuggaaucgagggccuguacaccgccgugcugauuaagaaucagaacaaccucgugugccggcugcggcggcuggccaaucagacagccaaaagccuggaacugcugcugagagugaccaccgaggaacggaccuucagccugaucaaucggcacgccaucgauuuucugcugaccagauggggcggcacuuguaaggugcugggccccgacuguugcaucggcaucgaggaccugagcaagaauaucuccgagcaaaucgaccagaucaagaaggaugagcagaaagagggaaccggguggggacugggcggaaagugguggacaucugacuggggcgugcugacuaaccugggaauacuucugcuccugucuaucgcagugcugaucgcccugagcugcaucugccggaucuucaccaaguacaucggcugauaauaggcuggagccucgguggccaugcuucuugccccuugggccuccccccagccccuccuccccuuccugcacccguacccccguggucuuugaauaaagucugagugggcggc

SEQ ID NO: 173 - RNA, 2225 nt, Artificial Sequence
  Synthetic polynucleotide
gggaaauaagagagaaaagaagaguaagaagaaauauaagaccccggcgccgccaccauggaaaccccugcccagcugcuauuccugcugcuccucuggcugccugacaccaccggccugcccauccuggaaaucgccagcaacaaucagccacagaacguggacagcgugugcagcggcacccugcagaaaaccgaagacgugcaccugaugggcuucacccugagcggacaaaagguagccgacagcccuuuagaggccagcaagagaugggccuucagaaccggcgugccccccaagaauguggaguacacggagggcgaggaagccaagaccuguuacaacaucagcgugaccgauccaagcggcaagucucugcuguuggaccccccuaccaacauccgggacuaccccaagugcaagaccauccaucacauccagggccagaacccucacgcccagggaauugcccugcaccuguggggcgccuuuuuccuguacgaccggaucgccuccaccaccauguaccggggcaagguguucacagaggguaauaucgccgccaugaucgugaacaaaaccgugcacaaaaugaucuucagccgucaaggccaaggcuaccggcacaugaaccugaccagcaccaacaaguacuggaccagcagcaacggcacccagaccaacgacaccggcuguuuuggagcccugcaggaguacaacagcacgaagaaccagaccugcgcccccagcaaaauccccccaccgcugccuacagccagacccgagaucaagcugaccuccaccccuaccgacgccaccaagcugaacaccacggacccuagcagcgacgacgaggaucuggccacaucgggcucuggcagcggcgagagagagccacauaccaccucugacgccguaaccaagcagggccugagcuccacaaugccuccgaccccaucuccucaaccuagcacaccucagcaaggcggcaacaacaccaaucacagccaggaugcugugaccgaacuggacaagaacaauaccaccgcccagcccuccaugcccccucauaacaccacaaccaucuccacaaacaacacuuccaagcacaacuucagcacacuguccgccccucugcagaauaccacuaacgauaacacccagagcaccaucaccgagaacgagcagacaagcgccccuagcaucaccacccugccucccaccggaaauccaacaaccgccaagagcacgagcuccaagaagggcccugccaccacagcccccaacacgaccaaugagcacuuuaccagccccccgcccacccccuccucuacagcccagcaccugguguacuuccggcggaagagauccauccuguggcgcgagggcgauauguuccccuuccuggacggccucaucaacgcccccaucgacuucgaccccgugcccaacacaaagacgaucuucgacgaaagcagcuccuccggcgccagcgccgaagaggaucagcaugccagcccaaacaucucccugacccucagcuacuuccccaauaucaacgagaacaccgccuauuccggcgagaaugagaacgacugcgacgccgagcugcggauuuggagcguucaggaagaugaccuggccgcugggcuguccuggaucccuuuuuucggcccuggaaucgagggccuguacaccgccgugcugauuaagaaucagaacaaccucgugugccggcugcggcggcuggccaaucagacagccaaaagccuggaacugcugcugagagugaccaccgaggaacggaccuucagccugaucaaucggcacgccaucgauuuucugcugaccagauggggcggcacuuguaaggugcugggccccgacuguugcaucggcaucgaggaccugagcaagaauaucuccgagcaaaucgaccagaucaagaaggaugagcagaaagagggaaccggguggggacugggcggaaagugguggacaucugacuggggcgugcugacuaaccugggaauacuucugcuccugucuaucgcagugcugaucgcccugagcugcaucugccggaucuucaccaaguacaucggcugauaauaggcuggagccucgguggccaugcuucuugccccuugggccuccccccagccccuccuccccuuccugcacccguacccccguggucuuugaauaaagucugagugggcggc

SEQ ID NO: 174 - RNA, 2260 nt, Artificial Sequence
  Synthetic polynucleotide
ucaagcuuuuggacccucguacagaagcuaauacgacucacuauagggaaauaagagagaaaagaagaguaagaagaaauauaagagccaccauggaaaccccugcccagcugcuguuccugcuucugcuguggcugcccgauaccaccggacuccccgugcuggaaaucgccagcaacagccagccccaggacguggacucuguauguagcggcacccugcagaaaaccgaagacgugcaccugaugggcuucacccugagcgggcagaaaguggccgacagcccucuggaagccagcaagagaugggccuucagaaccggcgugccccccaaaaacguggaguacacggagggcgaggaagccaagaccugcuacaauaucagcgugaccgaccccagcggcaagucucuccugcuggaucccccuucuaacauccgggacuaucccaagugcaagaccgugcaccacauccagggccagaauccucacgcccagggaauugcccugcacuuauggggcgccuuuuuccuguaugaccggguggccagcaccaccauguaccggggcaagguguucaccgagggcaauaucgccgccaugaucgugaacaagacagugcacagaaugaucuucagcagacagggacagggcuaccggcacaugaaccugaccuccaccaacaaguacuggaccagcagcaacgagacacagcggaacgacaccggcugcuucggcauucugcaagaauacaacucaaccaauaaccagaccugccccccuagccugaagccuccgucgcugccuaccgugacgcccagcauccacagcacaaauacccagaucaacaccgccaaguccggcaccaugaaucccagcagcgacgacgaggaccugaugaucagcggcucuggcagcggcgagcagggcccucacacaacacugaacguugugaccgagcagaagcagagcagcacuauccugagcacccccagccugcacccuagcacaucucaacacgagcaaaauagcaccaaccccucccgccacgccgugacagagcacaacggcaccgacccgacaacccagcccgccaccuuacugaacaacaccaacaccacccccaccuauaacaccuuaaaguacaaccuguccacccccuccccccccacccggaacaucacaaacaacgacacgcagagagagcuggccgaaagcgagcagacaaaugcucagcugaauaccacccuggaccccaccgagaaccccacaaccggccaggacaccaauuccacaaccaacaucauaaugaccaccagcgacaucaccagcaagcacccgaccaacagcuccccugauaguagccccaccaccagaccacccauauacuucagaaagaagcggagcaucuucuggaaagaaggcgauaucuuucccuuccuggacggccugaucaauacggagaucgacuucgaccccauccccaacaccgagacgaucuucgacgagagccccagcuucaacaccuccacaaaugaagaacagcacaccccgcccaacauuucucugaccuucagcuacuuccccgacaagaacggcgacaccgccuacuccggcgagaacgagaaugacugcgaugccgaacugcggauuuggagcguacaggaagaugaccuggccgcuggccugagcuggauaccuuuuuucggcccuggcaucgagggccuguacaccgccgggcugaucaagaaucagaacaaccucgugugccggcugcggagacuggccaaucagacagccaaaagccuggaacugcugcuaagagugaccaccgaggaaagaaccuucucccucaucaaccggcaugccaucgacuuucugcugaccagauggggaggcacaugcaagguacugggccccgauugcugcaucggaaucgaggaucugagcaagaacaucuccgaacagaucgacaagauccggaaggaugagcagaaagaggaaaccggcuggggccugggcgggaagugguggacuucugauuggggcgugcucaccaaccugggaauccugcugcuccucucuaucgccgugcugaucgcccuuagcugcaucugccggauuuucaccaaguacaucggcugauaauaggcuggagccucgguggccaugcuucuugccccuugggccuccccccagccccuccuccccuuccugcacccguacccccguggucuuugaauaaagucugagugggcggc

SEQ ID NO: 175 - RNA, 2225 nt, Artificial Sequence
  Synthetic polynucleotide
gggaaauaagagagaaaagaagaguaagaagaaauauaagaccccggcgccgccaccauggaaaccccugcccagcugcuguuccugcuucugcuguggcugcccgauaccaccggacuccccgugcuggaaaucgccagcaacagccagccccaggacguggacucuguauguagcggcacccugcagaaaaccgaagacgugcaccugaugggcuucacccugagcgggcagaaaguggccgacagcccucuggaagccagcaagagaugggccuucagaaccggcgugccccccaaaaacguggaguacacggagggcgaggaagccaagaccugcuacaauaucagcgugaccgaccccagcggcaagucucuccugcuggaucccccuucuaacauccgggacuaucccaagugcaagaccgugcaccacauccagggccagaauccucacgcccagggaauugcccugcacuuauggggcgccuuuuuccuguaugaccggguggccagcaccaccauguaccggggcaagguguucaccgagggcaauaucgccgccaugaucgugaacaagacagugcacagaaugaucuucagcagacagggacagggcuaccggcacaugaaccugaccuccaccaacaaguacuggaccagcagcaacgagacacagcggaacgacaccggcugcuucggcauucugcaagaauacaacucaaccaauaaccagaccugccccccuagccugaagccuccgucgcugccuaccgugacgcccagcauccacagcacaaauacccagaucaacaccgccaaguccggcaccaugaaucccagcagcgacgacgaggaccugaugaucagcggcucuggcagcggcgagcagggcccucacacaacacugaacguugugaccgagcagaagcagagcagcacuauccugagcacccccagccugcacccuagcacaucucaacacgagcaaaauagcaccaaccccucccgccacgccgugacagagcacaacggcaccgacccgacaacccagcccgccaccuuacugaacaacaccaacaccacccccaccuauaacaccuuaaaguacaaccuguccacccccuccccccccacccggaacaucacaaacaacgacacgcagagagagcuggccgaaagcgagcagacaaaugcucagcugaauaccacccuggaccccaccgagaaccccacaaccggccaggacaccaauuccacaaccaacaucauaaugaccaccagcgacaucaccagcaagcacccgaccaacagcuccccugauaguagccccaccaccagaccacccauauacuucagaaagaagcggagcaucuucuggaaagaaggcgauaucuuucccuuccuggacggccugaucaauacggagaucgacuucgaccccauccccaacaccgagacgaucuucgacgagagccccagcuucaacaccuccacaaaugaagaacagcacaccccgcccaacauuucucugaccuucagcuacuuccccgacaagaacggcgacaccgccuacuccggcgagaacgagaaugacugcgaugccgaacugcggauuuggagcguacaggaagaugaccuggccgcuggccugagcuggauaccuuuuuucggcccuggcaucgagggccuguacaccgccgggcugaucaagaaucagaacaaccucgugugccggcugcggagacuggccaaucagacagccaaaagccuggaacugcugcuaagagugaccaccgaggaaagaaccuucucccucaucaaccggcaugccaucgacuuucugcugaccagauggggaggcacaugcaagguacugggccccgauugcugcaucggaaucgaggaucugagcaagaacaucuccgaacagaucgacaagauccggaaggaugagcagaaagaggaaaccggcuggggccugggcgggaagugguggacuucugauuggggcgugcucaccaaccugggaauccugcugcuccucucuaucgccgugcugaucgcccuuagcugcaucugccggauuuucaccaaguacaucggcugauaauaggcuggagccucgguggccaugcuucuugccccuugggccuccccccagccccuccuccccuuccugcacccguacccccguggucuuugaauaaagucugagugggcggc

SEQ ID NO: 176 - RNA, 2260 nt, Artificial Sequence
  Synthetic polynucleotide
ucaagcuuuuggacccucguacagaagcuaauacgacucacuauagggaaauaagagagaaaagaagaguaagaagaaauauaagagccaccauggaaaccccugcccagcugcuguuccugcugcuauuguggcugccugacaccacaggccugcccauccuggaaaucgccagcaaugaccagccgcagaauguugacagcgugugcagcggcacucugcagaaaaccgaggacgugcaccugaugggcuucacccugagcggacagaagguggcugacagcccucuggaagccagcaagagaugggccuucagaaccggagugcccccuaagaauguggaguacaccgagggcgaggaagccaagaccuguuacaacaucagcgugaccgaccccagcggcaagucucuguuguuagacccuccuaccaaugugcgggacuaccccaagugcaagaccauucaucacauccagggccagaacccccacgcccaaggaauugcucugcaccuguggggagccuuuuuccuguaugaccggaucgccuccaccaccauguaccggggcaagguguucacagagggcaauaucgccgccaugaucgugaacaagaccgugcacaagaugaucuucagcagacaaggccagggcuaccgacacaugaaccugaccagcaccaacaaguacuggaccagcagcaacggcacccagacgaacgacaccggcugcuucggaacccugcaggaguacaacuccaccaagaaccagaccugcacccccuccaagaccccgccuaguccuccuacagcgcaccccgagaucaagcccaccucaaccccuaccgaugccacaagacugaacacgaccaaccccaacagcgacgacgaggaccucaccacaagcggcucuggauccggagagcaggaacccgauacaaccucugacgccgugaccaagcagggccuuagcagcacuaugcccccaaccccuuccccucagccuggcacaccucagcagggcggcaacaacacaaaccacucucaagaugccgccaccgagcuggacaacucaaauaccacagcccagccccccaccccaucacacaauacgaccacaaucuccacaaacaauaccagcaagcauaaccugucuacccuguccgagcugccucagaacaccacaaauccuaacacgcagagcauggccacagagaacgagaagaccagcgcgagccccaaaaccacgcucccuccaacagagagccccaccaccgaaaagagcacaaauaauaccaaguccccaacgaccauggaacccaacaccacuaacggccacuuuaccagcccuagcucgacgcccaauagcaccacccagcacuuaauauacuuucggcggaagcggagcauccuguggcgggagggcgacauguuccccuuccuggacggccugauaaacgcccccaucgacuucgaccccgugcccaacacuaagaccaucuucgacgaaagcagcagcuccggcgccagcgccgaagaagaucagcacgccagcuccaacaucucccugacccugucuuaccugccccacaccagcgaaaacacagccuacuccggcgagaaugagaacgacugcgacgccgaacugcggauuuggagcguucaagaagaugaccuggccgcuggccugagcuggauaccuuuuuucggcccuggcaucgagggacuguacaccgccggacugaucaagaaucagaacaaccucgucugccggcugcggcggcuggccaaucagacagccaaaagccuggaacugcugcugagagugaccaccgaggaacggaccuucucccuuaucaaucggcacgccaucgauuuucugcugaccagauggggcggcacaugcaaagugcugggccccgauugcugcaucggcauugaggaccugucccggaacauuuccgaacagaucgaucagaucaaaaaggacgagcagaaagagggcacgggcuggggacugggcggaaagugguggacaucugacuggggaguccugaccaaucugggaauacuucugcugcucucuaucgccgugcugauugcccucagcugcaucuguagaaucuucaccaaguacaucggcugauaauaggcuggagccucgguggccaugcuucuugccccuugggccuccccccagccccuccuccccuuccugcacccguacccccguggucuuugaauaaagucugagugggcggc

SEQ ID NO: 177 - RNA, 2225 nt, Artificial Sequence
  Synthetic polynucleotide
gggaaauaagagagaaaagaagaguaagaagaaauauaagaccccggcgccgccaccauggaaaccccugcccagcugcuguuccugcugcuauuguggcugccugacaccacaggccugcccauccuggaaaucgccagcaaugaccagccgcagaauguugacagcgugugcagcggcacucugcagaaaaccgaggacgugcaccugaugggcuucacccugagcggacagaagguggcugacagcccucuggaagccagcaagagaugggccuucagaaccggagugcccccuaagaauguggaguacaccgagggcgaggaagccaagaccuguuacaacaucagcgugaccgaccccagcggcaagucucuguuguuagacccuccuaccaaugugcgggacuaccccaagugcaagaccauucaucacauccagggccagaacccccacgcccaaggaauugcucugcaccuguggggagccuuuuuccuguaugaccggaucgccuccaccaccauguaccggggcaagguguucacagagggcaauaucgccgccaugaucgugaacaagaccgugcacaagaugaucuucagcagacaaggccagggcuaccgacacaugaaccugaccagcaccaacaaguacuggaccagcagcaacggcacccagacgaacgacaccggcugcuucggaacccugcaggaguacaacuccaccaagaaccagaccugcacccccuccaagaccccgccuaguccuccuacagcgcaccccgagaucaagcccaccucaaccccuaccgaugccacaagacugaacacgaccaaccccaacagcgacgacgaggaccucaccacaagcggcucuggauccggagagcaggaacccgauacaaccucugacgccgugaccaagcagggccuuagcagcacuaugcccccaaccccuuccccucagccuggcacaccucagcagggcggcaacaacacaaaccacucucaagaugccgccaccgagcuggacaacucaaauaccacagcccagccccccaccccaucacacaauacgaccacaaucuccacaaacaauaccagcaagcauaaccugucuacccuguccgagcugccucagaacaccacaaauccuaacacgcagagcauggccacagagaacgagaagaccagcgcgagccccaaaaccacgcucccuccaacagagagccccaccaccgaaaagagcacaaauaauaccaaguccccaacgaccauggaacccaacaccacuaacggccacuuuaccagcccuagcucgacgcccaauagcaccacccagcacuuaauauacuuucggcggaagcggagcauccuguggcgggagggcgacauguuccccuuccuggacggccugauaaacgcccccaucgacuucgaccccgugcccaacacuaagaccaucuucgacgaaagcagcagcuccggcgccagcgccgaagaagaucagcacgccagcuccaacaucucccugacccugucuuaccugccccacaccagcgaaaacacagccuacuccggcgagaaugagaacgacugcgacgccgaacugcggauuuggagcguucaagaagaugaccuggccgcuggccugagcuggauaccuuuuuucggcccuggcaucgagggacuguacaccgccggacugaucaagaaucagaacaaccucgucugccggcugcggcggcuggccaaucagacagccaaaagccuggaacugcugcugagagugaccaccgaggaacggaccuucucccuuaucaaucggcacgccaucgauuuucugcugaccagauggggcggcacaugcaaagugcugggccccgauugcugcaucggcauugaggaccugucccggaacauuuccgaacagaucgaucagaucaaaaaggacgagcagaaagagggcacgggcuggggacugggcggaaagugguggacaucugacuggggaguccugaccaaucugggaauacuucugcugcucucuaucgccgugcugauugcccucagcugcaucuguagaaucuucaccaaguacaucggcugauaauaggcuggagccucgguggccaugcuucuugccccuugggccuccccccagccccuccuccccuuccugcacccguacccccguggucuuugaauaaagucugagugggcggc

SEQ ID NO: 178 - protein, 20 aa, Artificial Sequence
  Synthetic polypeptide
METPAQLLFLLLLWLPDTTG

SEQ ID NO: 179 - protein, 18 aa, Artificial Sequence
  Synthetic polypeptide
MDWTWILFLVAAATRVHS

SEQ ID NO: 180 - protein, 24 aa, Artificial Sequence
  Synthetic polypeptide
MLGSNSGQRVVFTILLLLVAPAYS

SEQ ID NO: 181 - protein, 17 aa, Artificial Sequence
  Synthetic polypeptide
MKCLLYLAFLFIGVNCA

SEQ ID NO: 182 - protein, 15 aa, Artificial Sequence
  Synthetic polypeptide
MWLVSLAIVTACAGA

SEQ ID NO: 183 - protein, 13 aa, Artificial Sequence
  Synthetic polypeptide
LQRVRELAVQSAN
